(19) United States
(12) Patent Application Publication
(10) Pub. No.: US 2010/0169025 A1
(43) Pub. Date: Jul. 1, 2010

(54) METHODS AND GENE EXPRESSION SIGNATURE FOR WNT/B-CATENIN SIGNALING PATHWAY

(76) Inventors: William T. Arthur, Perkasie, PA (US); Brian Roberts, Brookline, MA (US); Rachel Needham, Seattle, WA (US); Hongyue Dai, Chestnut Hill, MA (US)

Correspondence Address: MERCK, P O BOX 2000, RAHWAY, NJ, 07065-0907, US

(21) Appl. No.: 12/641,486

(22) Filed: Dec. 18, 2009

Related U.S. Application Data
(63) Continuation-in-part of application No. 12/586,208, filed on Sep. 17, 2009.
(60) Provisional application No. 61/195,811, filed on Oct. 10, 2008.

(51) Int. Cl. G06F 19/00; C12Q 1/68; G06N 5/02

(52) U.S. Cl. 702/19; 435/6; 706/54

(57) ABSTRACT

Methods, biomarkers, and expression signatures are disclosed for assessing the regulation status of Wnt/β-catenin signaling pathway in a cell sample or subject. More specifically, several aspects of the invention provide a set of genes which can be used as biomarkers and gene signatures for evaluating Wnt/β-catenin pathway deregulation status in a sample; classifying a cell sample as having a deregulated or regulated Wnt/β-catenin signaling pathway; determining whether an agent modulates the Wnt/β-catenin signaling pathway in sample; predicting response of a subject to an agent that modulates the Wnt/β-catenin signaling pathway; assigning treatment to a subject; and evaluating the pharmacodynamic effects of therapies designed to regulate Wnt/β-catenin pathway signaling.

[0001] This is a continuation-in-part of U.S. patent application Ser. No. 12/586,208, filed on Sep. 17, 2009, which in turn claims benefit of U.S. Provisional Patent Application Ser. No. 61/195,811 filed on Oct. 10, 2008, each of which is incorporated by reference herein in its entirety.

[0002] The sequence listing of the present application is submitted electronically via EFS-Web as an ASCII formatted sequence listing with a file name “ROSONC00002USCIP.TXT”, creation date of Dec. 15, 2009, and a size of 1,909 KB. This sequence listing submitted via EFS-Web is part of the specification and is herein incorporated by reference in its entirety.

### BACKGROUND OF THE INVENTION

[0003] Upon Wnt receptor activation, three different signaling cascades are activated (Huelsken and Birchmeier, 2001, Curr. Opin. Genet. Dev. 11:547-553): 1) the Wnt/Ca²⁺ pathway, which leads to activation of the protein kinase C and the Ca²⁺ calmodulin dependent protein kinase II; 2) the cytoskeleton pathway, which regulates organization and formation of the cytoskeleton and planar cell polarity; and 3) the canonical Wnt pathway, which controls the intracellular level of the proto-oncoprotein β-catenin. The canonical pathway, also known as the “Wnt/β-catenin” pathway or “β-catenin” pathway is the most studied and the best understood among the three Wnt pathways (Clevers, 2006, Cell 127:469-480).

[0004] The key protein of the Wnt/β-catenin pathway is the proto-oncoprotein β-catenin, which can switch between two different intracellular pools. In the absence of the Wnt signal, β-catenin is bound to the cytoplasmic domain of the membrane anchored E-cadherin where it forms together with α-cadherin a connecting bridge to the cytoskeletal protein actin. The β-catenin level in the cytosol is kept low by the so-called destruction complex, which is formed by the active serine-threonin kinase glycogen synthase kinase-3β (GSK3β) and several other cytosolic proteins including the tumor suppressor proteins APC (Adenomatous Polyposis coli) and Axin/Conductin. Phosphorylation of β-catenin by GSK3β leads to its ubiquitinylation via β-TrCP (β-Transducin repeat Containing Protein) and to its degradation by the proteasomal degradation machinery. The activation of the Wnt/β-catenin pathway begins with the hetero-dimerization of the Wnt receptor Frizzled (Fz) with its co-receptor LRP5/6 (low-density lipoprotein receptor related protein). The subsequent hyperphosphorylation of Dishevelled (Dsh) by the activated casein kinase 2 (CK2) leads to the inhibition of GSK3β (Willert et al., 1997, EMBO J. 16:3089-3096). As a consequence, the destruction complex disassembles, β-catenin is not phosphorylated any more, and the level of cytosolic and nuclear β-catenin increases. Nuclear β-catenin interacts with T-cell factor/Lymphoid enhancer factor (TCF/Lef) and displaces co-repressors (Staal et al., 2002, EMBO Rep. 3:63-68). The β-catenin/TCF complex activates transcription of many different target genes.

[0005] Products of Wnt target genes unfold a large variety of biochemical functions including cell cycle kinase regulation, cell adhesion, hormone signaling, and transcription regulation. The plurality and diversity of the biochemical functions reflect the variety of different biological effects of the Wnt/β-catenin pathway, including activation of cell-cycle progression and proliferation, inhibition of apoptosis, regulation of embryonic development, cell differentiation, cell growth, and cell migration (reviewed in Vlad et al., 2008, Cellular Signaling 20:795-802). Numerous target genes of the β-catenin/TCF complex have been identified and may be found on the Wnt homepage (http://www.stanford.edu/˜musse/wntwindow.html).

[0006] Wnt/β-catenin signaling is involved in adult tissue self-renewal. The Wnt/β-catenin cascade may be required for establishment of the progenitor compartment in the intestinal epithelium (Korinek et al., 1998, Nat. Genet. 19:1-5). Wnt proteins also promote the terminal differentiation of Paneth cells at the base of the intestinal crypts (Van Es et al., 2005, Nature 435:959-963). Wnt/β-catenin signaling is required for the establishment of the hair follicle (van Genderen et al., 1994, Genes Dev. 8:2691-2703) Wnt/β-catenin signals in hair follicles activates bulge stem cells, promotes entry into the hair lineage, and recruits the cells to the transit-amplifying matrix compartment (Lowry et al., 2005, 19:1596-1611; Huelsken et al., 2001, 105:533-545). The Wnt/β-catenin pathway is also an important regulator of hematopoietic stem and progenitor cells and bone homeostasis (reviewed in Clevers, 2006, Cell 469-480).

[0007] Wnt/β-catenin signaling is also implicated in cancer. Germline APC mutation is the genetic cause of Familiar Adenomatous Polyposis (FAP) (Kinzler et al., 1991; Nishisho et al., 1991). Loss of both APC alleles occurs in a large majority of sporadic colorectal cancers. β-catenin is inappropriately stabilized as a consequence of the loss of APC (Rubinfeld et al., 1996). These mutations activate β-catenin signaling, inhibit cellular differentiation, increase cellular proliferation, and ultimately result in the formation of precancerous intestinal polyps (Gregorieff and Clevers, 2005, Genes Dev. 19:877-890; Logan and Nusse, 2004, Annu. Rev. Cell Dev. Biol. 20:781-810). In rare cases of colorectal cancer where APC is not mutated, Axin 2 is mutant (Liu et al., 2000), or β-catenin has an activating point mutation that removes its N-terminal Ser/Thr destruction motif (Morin et al., 1997). Activating Wnt/β-catenin pathway mutations are not limited to intestinal cancer. Loss-of-function Axin mutations have also been found in hepatocellular carcinomas, and oncogenic β-catenin mutations occur in a wide variety of solid tumors (reviewed in Reya and Clevers, 2005). Mutational activation of the Wnt/β-catenin cascade may also be involved in hair follicle tumors (reviewed in Clevers, 2006, Cell 469-480). Inactivating mutations in the Wnt/β-catenin signaling pathway have also been identified in human sebaceous tumors, which carried LEF1 mutations (Takeda et al, 2006). Wnt/β-catenin signaling is also implicated in cancer stem cell regulation (Malanchi et al., 2008, 452:650-653; reviewed by Fodde and Brabletz, 2007, Curr. Opin. Cell Biol. 19:150-158).

[0008] The identification of patient subpopulations most likely to respond to therapy is a central goal of modern molecular medicine. This notion is particularly important for cancer due to the large number of approved and experimental therapies (Rothenberg et al., 2003, Nat. Rev. Cancer 3:303-309), low response rates to many current treatments, and clinical importance of using the optimal therapy in the first treatment cycle (Dracopoli, 2005, Curr. Mol. Med. 5:103-110). In addition, the narrow therapeutic index and severe toxicity profiles associated with currently marketed cytotoxics results in a pressing need for accurate response prediction. Although recent studies have identified gene expression signatures associated with response to cytotoxic chemotherapies (Folgueria et al., 2005, Clin. Cancer Res. 11:7434-7443; Ayers et al., 2004, 22:2284-2293; Chang et al., 2003, Lancet 362:362-369; Rouzier et al., 2005, Proc. Natl. Acad. Sci. USA 102: 8315-8320), these examples (and others from the literature) remain unvalidated and have not yet had a major effect on clinical practice. In addition to technical issues, such as lack of a standard technology platform and difficulties surrounding the collection of clinical samples, the myriad of cellular processes affected by cytotoxic chemotherapies may hinder the identification of practical and robust gene expression predictors of response to these agents. One exception may be the recent finding by microarray that low mRNA expression of the microtubule-associate protein Tau is predictive of improved response to paclitaxel (Rouzier et al., supra).

[0009] To improve on the limitations of cytotoxic chemotherapies, current approaches to drug design in oncology are aimed at modulating specific cell signaling pathways important for tumor growth and survival (Hahn and Weinberg, 2002, Nat. Rev. Cancer 2:331-341; Hanahan and Weinberg, 2000, Cell 100:57-70; Trosko et al., 2004, Ann. N.Y. Acad. Sci. 1028:192-201). In cancer cells, these pathways become deregulated resulting in aberrant signaling, inhibition of apoptosis, increased metastasis, and increased cell proliferation (reviewed in Adjei and Hildalgo, 2005, J. Clin. Oncol. 23:5386-5403). Although normal cells integrate multiple signaling pathways for controlled growth and proliferation, tumors seem to be heavily reliant on activation of one or two pathways (“oncogene activation”). Aberrant Wnt/β-catenin pathway signaling can cause cancer and a number of genetic defects in this pathway may contribute to tumor promotion and progression (reviewed in Polakis, 2000, Genes Dev. 14:1837-1851). Hyperactivation of the Wnt/β-catenin pathway is one of the most frequent signaling abnormalities in several human cancers, including colorectal carcinomas (Morin et al., 1997, Science 275:1787-1790), melanomas (Rubinfeld et al., 1997, Science 275:1790-1792), hepatoblastomas (Koch et al., 1999, Cancer Res. 59:269-273), medulloblastomas (Zurawel et al, 1998, Cancer Res. 58:896-899), prostatic carcinomas (Voeller et al, 1998, Cancer Res. 58:2520-2523), and uterine and ovarian endometrioid adenocarcinomas (Schlosshauer et al., 2000, Mod. Pathol. 13:1066-1071; Mirabelli-Primdahl et al, 1999, Cancer Res. 59:3346-3351; Saegusa and Okayasu, 2001, J. Pathol. 194:59-67; Wu et al., 2001, Cancer Res. 61:8247-8255). Wnt/β-catenin pathway activation is also common in metaplastic carcinomas of the breast (Hayes et al., 2008, Clin. Cancer Res. 14:4038-4044). The components of these aberrant signaling pathways represent attractive selective targets for new anticancer therapies. In addition, responder identification for target therapies may be more achievable than for cytotoxics, as it seems logical that patients with tumors that are “driven” by a particular pathway will respond to therapeutics targeting components of that pathway. Therefore, it is crucial that we develop methods to identify which pathways are active in which tumors and use this information to guide therapeutic decisions. One way to enable this is to identify gene expression profiles that are indicative of pathway activation status.

[0010] A multitude of pathway components may activate, modify, or inhibit Wnt/β-catenin signaling at multiple points or may be involved in crosstalk to other pathways. Measuring pathway activity by testing only a few well-characterized pathway components may miss other important pathway mediators. Given its involvement in numerous biological functions and diseases, a gene expression signature-based readout of pathway activation may be more appropriate than relying on a single indicator of pathway activity, as the same signature of gene expression may be elicited by activation of multiple components of the pathway. In addition, by integrating expression data from multiple genes, a quantitative assessment of pathway activity may be possible. In addition to using gene expression signatures for classification cell samples, including but not limited to tumors, by assessing pathway activation status, gene expression signatures for pathway activation may also be used as pharmacodynamic biomarkers, i.e. monitoring pathway inhibition in patient tumors or peripheral tissues post-treatment; as response prediction biomarkers, i.e. prospectively identifying patients harboring tumors that have high levels of a particular pathway activity before treating the patients with inhibitors targeting the pathway; and as early efficacy biomarkers, i.e. an early readout of efficacy. A gene expression signature for pathway activity may also be used to screen for agents that modulate pathway signaling.

### BRIEF DESCRIPTION OF THE DRAWINGS

[0011] The patent or application file contains at least one drawing executed in color. Copies of this patent or patent application publication with color drawing(s) will be provided by the Office upon request and payment of the necessary fee.

[0012] FIG. 1. An extensively validated mammalian genome-wide siRNA screen on the Wnt/β-catenin signal transduction pathway. (A) Schematic of the primary, secondary and tertiary phases of the siRNA screen and integration of the data into a global protein-interaction network. (B) Scatter plot of secondary screen data showing normalized luciferase values in DLD1 and SW480 colorectal cancer cell lines. The data represents pooled siRNAs. Colored circles depict siRNA pools that confirmed when deconvoluted to multiple individual siRNAs. (C) Heat map representation of cDNA microarray data for the Wnt/β-catenin gene signature following time-course analysis of siRNA mediated silencing of β-catenin in DLD1 cells. (D) Correct assignment of normal and tumor colon tissue by unsupervised hierarchical clustering using the Wnt/β-catenin gene signature. To show polarity, the expression profile of DLD1 cells transfected with β-catenin siRNAs is shown below the panel.

[0013] FIG. 2. The tertiary validation screen employs endogenous β-catenin target genes as an indicator of pathway activation. Heat map representation of gene expression quantification following siRNA transfection in DLD1 cells is shown. For the majority of siRNAs, quantitative PCR was employed to determine the expression of the β-catenin regulated genes following siRNA transfection of DLD1 cells. Additionally, several of the siRNAs were screened by genome-wide microarray analysis of transfected DLD1 cells. Data are log(2) transformed and the average of three independent experiments. The p-value of a siRNA's signature overlap with the WNT/β-catenin signature was calculated using the hypergeometric distribution and Bonferroni corrected.

[0014] FIG. 3. Volcano plot of DLD1 genome-scale siRNA primary screen. siRNA pools were colored red if they met both quantitative and statistical thresholds.

[0015] FIG. 4. Determination of the Wnt/β-catenin gene signature. (A) Cartoon schematic of cDNA microarray data reduction. (B) Heat map representation of microarray expression profiles for DLD1 cells transfected with 5 different siRNAs targeting β-catenin. (C) Heat map representation of genes regulated by β-catenin in DLD1 cells and SW480 cells.

[0016] FIG. 5. Heat map of Wnt/β-catenin signaling pathway signature in HCC tumors. Approximately 30% of the patients (boxed) have activated pathway as measured by this set of biomarkers. On the right panel: “0” stands for no-recurrence, and “1” for recurrence.

### DETAILED DESCRIPTION OF THE INVENTION

[0017] This section presents a detailed description of the many different aspects and embodiments that are representative of the inventions disclosed herein. This description is by way of several exemplary illustrations, of varying detail and specificity. Other features and advantages of these embodiments are apparent from the additional descriptions provided herein, including the different examples. The provided examples illustrate different components and methodology useful in practicing various embodiments of the invention. The examples are not intended to limit the claimed invention. Based on the present disclosure the ordinary skilled artisan can identify and employ other components and methodology useful for practicing the present invention.

### 3.1 INTRODUCTION

[0018] Various embodiments of the invention relate to sets of genetic biomarkers whose expression patterns correlate with an important characteristic of cancer cells, i.e., deregulation of the Wnt/β-catenin signaling pathway. In some embodiments, these sets of biomarkers may be split into two opposing “arms”—the “up” arm (Table 4a), which are the genes that are upregulated, and the “down” arm (Table 4b), which are the genes that are downregulated, as signaling through the Wnt/β-catenin signaling pathway increases. More specifically, some aspects of the invention provide for sets of genetic biomarkers whose expression correlates with the regulation status of the Wnt/β-catenin signaling pathway of a cell sample of a subject, and which can be used to classify samples with deregulated Wnt/β-catenin signaling pathway from samples with regulated Wnt/β-catenin signaling pathway. In a specific embodiment, the cell sample is from a tumor. Wnt/β-catenin signaling pathway regulation status is a useful indicator of the likelihood that a subject will respond to certain therapies, such as inhibitors of the Wnt/β-catenin signaling pathway. Such therapies include, but are not limited to: thiazolidinediones (Wang et al., 2008, J. Surg. Res. Jun. 27, 2008 e-publication ahead of print); PKF115-584 (Doghman et al., 2008, J. Clin. Endocrinol. Metab. E-publication ahead of print, doi: 10.1210/jc.2008-0247); bis[2-(acylamino)phenyl]disulfide (Yamakawa et al., 2008, Biol Pharm. Bull. 31:916-920); FH535 (Handeli and Simon, 2008, Mol. Cancer Ther. 7:521-529); suldinac (Han et al., 2008, Eur. J. Pharmacol. 583:26-31); cyclooxygenase-2 inhibitor celecoxib (Tuynman et al., 2008, Cancer Res. 68:1213-1220); reverse-turn mimetic compounds (U.S. Pat. No. 7,232,822); β-catenin inhibitor compound 1 (WO2005021025); fusicoccin analog (WO2007062243); and FZD10 modulators (WO2008061020). In one aspect of the invention, methods are provided for use of these biomarkers to distinguish between patient groups that will likely respond to inhibitors of the Wnt/β-catenin signaling pathway (predicted responders) and patient groups that will not likely respond to inhibitors of the Wnt/β-catenin signaling pathway and to determine general courses of treatment (predicted non-responders). In another aspect of the invention, methods are provided for use of these biomarkers to classify a cell sample from a subject as having regulated or deregulated Wnt/β-catenin signaling pathway. Another aspect of the invention relates to biomarkers whose expression correlates with a pharmacodynamic effect of a therapeutic agent on the Wnt/β-catenin signaling pathway in subject with cancer. In yet other aspects of the invention, methods are provided for use of these biomarkers to measure the pharmacodynamic effect of a therapeutic agent on the Wnt/β-catenin signaling pathway in a subject with cancer and the use of these biomarkers to rank the efficacy of therapeutic agents to modulate the Wnt/β-catenin signaling pathway. Microarrays comprising these biomarkers are also provided, as well as methods of constructing such microarrays. Each of the biomarkers correspond to a gene in the human genome, i.e., such biomarker is identifiable as all or a portion of a gene. Finally, because each of the above biomarkers correlate with cancer-related conditions, the biomarkers, or the proteins they encode, are likely to be targets for drugs against cancer.

### 3.2 DEFINITIONS

[0019] Unless defined otherwise, all technical and scientific terms used herein have the same meaning as commonly understood to one of ordinary skill in the art to which this invention belongs.

[0020] As used herein, oligonucleotide sequences that are complementary to one or more of the genes described herein, refers to oligonucleotides that are capable of hybridizing under stringent conditions to at least part of the nucleotide sequence of said genes. Such hybridizable oligonucleotides will typically exhibit at least about 75% sequence identity at the nucleotide level to said genes, preferably about 80% or 85% sequence identity or more preferably about 90% or 95% or more sequence identity to said genes.

[0021] “Bind(s) substantially” refers to complementary hybridization between a probe nucleic acid and a target nucleic acid and embraces minor mismatches that can be accommodated by reducing the stringency of the hybridization media to achieve the desired detection of the target polynucleotide sequence.

[0022] The phrase “hybridizing specifically to” refers to the binding, duplexing or hybridizing of a molecule substantially to or only to a particular nucleotide sequence or sequences under stringent conditions when that sequence is present in a complex mixture (e.g., total cellular) DNA or RNA.

[0023] “Biomarker” means any gene, protein, or an EST derived from that gene, the expression or level of which changes between certain conditions. Where the expression of the gene correlates with a certain condition, the gene is a biomarker for that condition.

[0024] “Biomarker-derived polynucleotides” means the RNA transcribed from a biomarker gene, any cDNA or cRNA produced therefrom, and any nucleic acid derived therefrom, such as synthetic nucleic acid having a sequence derived from the gene corresponding to the biomarker gene.

[0025] A gene marker is “informative” for a condition, phenotype, genotype or clinical characteristic if the expression of the gene marker is correlated or anti-correlated with the condition, phenotype, genotype or clinical characteristic to a greater degree than would be expected by chance.

[0026] As used herein, the term “gene” has its meaning as understood in the art. However, it will be appreciated by those of ordinary skill in the art that the term “gene” may include gene regulatory sequences (e.g., promoters, enhancers, etc.) and/or intron sequences. It will further be appreciated that definitions of gene include references to nucleic acids that do not encode proteins but rather encode functional RNA molecules such as tRNAs. For clarity, the term gene generally refers to a portion of a nucleic acid that encodes a protein; the term may optionally encompass regulatory sequences. This definition is not intended to exclude application of the term “gene” to non-protein coding expression units but rather to clarify that, in most cases, the term as used in this document refers to a protein coding nucleic acid. In some cases, the gene includes regulatory sequences involved in transcription, or message production or composition. In other embodiments, the gene comprises transcribed sequences that encode for a protein, polypeptide or peptide. In keeping with the terminology described herein, an “isolated gene” may comprise transcribed nucleic acid(s), regulatory sequences, coding sequences, or the like, isolated substantially away from other such sequences, such as other naturally occurring genes, regulatory sequences, polypeptide or peptide encoding sequences, etc. In this respect, the term “gene” is used for simplicity to refer to a nucleic acid comprising a nucleotide sequence that is transcribed, and the complement thereof. In particular embodiments, the transcribed nucleotide sequence comprises at least one functional protein, polypeptide and/or peptide encoding unit. As will be understood by those in the art, this functional term “gene” includes both genomic sequences, RNA or cDNA sequences, or smaller engineered nucleic acid segments, including nucleic acid segments of a non-transcribed part of a gene, including but not limited to the non-transcribed promoter or enhancer regions of a gene. Smaller engineered gene nucleic acid segments may express, or may be adapted to express using nucleic acid manipulation technology, proteins, polypeptides, domains, peptides, fusion proteins, mutants and/or such like. The sequences which are located 5′ of the coding region and which are present on the mRNA are referred to as 5′ untranslated sequences (“5′UTR”). The sequences which are located 3′ or downstream of the coding region and which are present on the mRNA are referred to as 3′ untranslated sequences, or (“3′UTR”).

[0027] “Signature” refers to the differential expression pattern. It could be expressed as the number of individual unique probes whose expression is detected when a cRNA product is used in microarray analysis. A signature may be exemplified by a particular set of biomarkers.

[0028] A “similarity value” is a number that represents the degree of similarity between two things being compared. For example, a similarity value may be a number that indicates the overall similarity between a cell sample expression profile using specific phenotype-related biomarkers and a control specific to that template (for instance, the similarity to a “deregulated Wnt/β-catenin signaling pathway” template, where the phenotype is deregulated Wnt/β-catenin signaling pathway status). The similarity value may be expressed as a similarity metric, such as a correlation coefficient, or may simply be expressed as the expression level difference, or the aggregate of the expression level differences, between a cell sample expression profile and a baseline template.

[0029] As used herein, the terms “measuring expression levels,” “obtaining expression level,” and “detecting an expression level” and the like, includes methods that quantify a gene expression level of, for example, a transcript of a gene, or a protein encoded by a gene, as well as methods that determine whether a gene of interest is expressed at all. Thus, an assay which provides a “yes” or “no” result without necessarily providing quantification, of an amount of expression is an assay that “measures expression” as that term is used herein. Alternatively, a measured or obtained expression level may be expressed as any quantitative value, for example, a fold-change in expression, up or down, relative to a control gene or relative to the same gene in another sample, or a log ratio of expression, or any visual representation thereof, such as, for example, a “heatmap” where a color intensity is representative of the amount of gene expression detected. The genes identified as being differentially expressed in tumor cells having Wnt/β-catenin signaling pathway deregulation may be used in a variety of nucleic acid or protein detection assays to detect or quantify the expression level of a gene or multiple genes in a given sample. Exemplary methods for detecting the level of expression of a gene include, but are not limited to, Northern blotting, dot or slot blots, reporter gene matrix (see for example, U.S. Pat. No. 5,569,588) nuclease protection, RT-PCR, microarray profiling, differential display, 2D gel electrophoresis, SELDI-TOF, ICAT, enzyme assay, antibody assay, and the like.

[0030] A “patient” can mean either a human or non-human animal, preferably a mammal.

[0031] As used herein, “subject”, as refers to an organism or to a cell sample, tissue sample or organ sample derived therefrom, including, for example, cultured cell lines, biopsy, blood sample, or fluid sample containing a cell. In many instances, the subject or sample derived therefrom, comprises a plurality of cell types. In one embodiment, the sample includes, for example, a mixture of tumor and normal cells. In one embodiment, the sample comprises at least 10%, 15%, 20%, et seq., 90%, or 95% tumor cells. The organism may be an animal, including but not limited to, an animal, such as a cow, a pig, a mouse, a rat, a chicken, a cat, a dog, etc., and is usually a mammal, such as a human.

[0032] As used herein, the term “pathway” is intended to mean a set of system components involved in two or more sequential molecular interactions that result in the production of a product or activity. A pathway can produce a variety of products or activities that can include, for example, intermolecular interactions, changes in expression of a nucleic acid or polypeptide, the formation or dissociation of a complex between two or more molecules, accumulation or destruction of a metabolic product, activation or deactivation of an enzyme or binding activity. Thus, the term “pathway” includes a variety of pathway types, such as, for example, a biochemical pathway, a gene expression pathway, and a regulatory pathway. Similarly, a pathway can include a combination of these exemplary pathway types.

[0033] “Wnt signaling pathway,” also known as the “Wnt/β-catenin signaling pathway” or “β-catenin signaling pathway” refers to one of the intracellular signaling pathways activated upon Wnt receptor activation, the canonical Wnt/β-catenin signaling pathway, which controls the intracellular level of the proto-oncoproteinβ-catenin. On activation of the Wnt signaling pathway by binding with the Wnt ligand (including, but not limited to, Wnt1, Wnt2, Wnt2B/13, Wnt3, Wnt3A, Wnt4, Wnt5A, Wnt5B, Wnt6, Wnt7A, Wnt8A, Wnt8B, Wnt9A, Wnt9B, Wnt10A, Wnt10B, Wnt11, and Wnt16), the Wnt receptor, Frizzled, hetero-dimerizes with its co-receptor LRP5/6 (low-density lipoprotein receptor related protein). Subsequently, activated Casein kinase 2 hyperphosphorylates Dishevelled, leading to the inhibition of GSK3β, a component of the destruction complex (including APC and Axin/Conductin) which regulates β-catenin levels in the cytosol. Phosphorylation of fβ-catenin by GSK3β leads to its ubiquitinylation via β-TrCP and to its degradation by the proteasomal degradation machinery. As a result of GSK3β inhibition, the destruction complex dissembles, β-catenin is no longer phosphorylated, and the level of cytosolic and nuclear β-catenin increases. Nuclear β-catenin interacts with T-cell factor/Lymphoid enhancer factor (TCF/Lef) and displaces co-repressors. The β-catenin/TCF complex activates transcription of many different target genes. (See also Clevers, 2006, Cell 127:469-480 for a review of the Wnt/β-catenin signaling cascade). The Wnt/β-catenin signaling pathway includes, but is not limited to, the genes, and proteins encoded thereby, listed in Table 1.

TABLE 1
Representative Wnt/β-catenin signaling pathway genes

| Symbol | NCBI Reference Transcript | SEQ ID NO: |
|---|---|---|
| ACTA1 | NM_001100 | SEQ ID NO: 1 |
| ACTA2 | NM_001613 | SEQ ID NO: 2 |
| ACTB | NM_001101 | SEQ ID NO: 3 |
| ACTC1 | NM_005159 | SEQ ID NO: 4 |
| ACTG1 | NM_001614 | SEQ ID NO: 5 |
| ACTG2 | NM_001615 | SEQ ID NO: 6 |
| ACTN1 | NM_001102 | SEQ ID NO: 7 |
| ACTR2 | NM_001005386 | SEQ ID NO: 8 |
| ACTR3 | NM_005721 | SEQ ID NO: 9 |
| ACTR3B | NM_020445 | SEQ ID NO: 10 |
| ACVR1 | NM_001105 | SEQ ID NO: 11 |
| ACVR1B | NM_004302 | SEQ ID NO: 12 |
| ACVR1C | NM_145259 | SEQ ID NO: 13 |
| ACVR2A | NM_001616 | SEQ ID NO: 14 |
| ACVR2B | NM_001106 | SEQ ID NO: 15 |
| AES | NM_198969 | SEQ ID NO: 16 |
| AKT1 | NM_001014432 | SEQ ID NO: 17 |
| AKT2 | NM_001626 | SEQ ID NO: 18 |
| AKT3 | NM_181690 | SEQ ID NO: 19 |
| APC | NM_000038 | SEQ ID NO: 20 |
| APC2 | NM_005883 | SEQ ID NO: 21 |
| ARPC1A | NM_006409 | SEQ ID NO: 22 |
| ARPC1B | NM_005720 | SEQ ID NO: 23 |
| ARPC2 | NM_152862 | SEQ ID NO: 24 |
| ARPC3 | NM_005719 | SEQ ID NO: 25 |
| ARPC4 | NM_005718 | SEQ ID NO: 26 |
| ARPC5 | NM_005717 | SEQ ID NO: 27 |
| AXIN1 | NM_003502 | SEQ ID NO: 28 |
| AXIN2 | NM_004655 | SEQ ID NO: 29 |
| B2M | NM_004048 | SEQ ID NO: 30 |
| BCAR1 | NM_014567 | SEQ ID NO: 31 |
| BCL9 | NM_004326 | SEQ ID NO: 32 |
| BIRC4 | NM_001167 | SEQ ID NO: 33 |
| BIRC5 | NM_001168 | SEQ ID NO: 34 |
| BMP4 | NM_130850 | SEQ ID NO: 35 |
| BTRC | NM_003939 | SEQ ID NO: 36 |
| CACYBP | NM_001007214 | SEQ ID NO: 37 |
| CAMK2A | NM_015981 | SEQ ID NO: 38 |
| CAMK2B | NM_172081 | SEQ ID NO: 39 |
| CAMK2D | NM_172128 | SEQ ID NO: 40 |
| CAMK2G | NM_172170 | SEQ ID NO: 41 |
| CASP9 | NM_032996 | SEQ ID NO: 42 |
| CAV1 | NM_001753 | SEQ ID NO: 43 |
| CBY1 | NM_001002880 | SEQ ID NO: 44 |
| CCND1 | NM_053056 | SEQ ID NO: 45 |
| CCND2 | NM_001759 | SEQ ID NO: 46 |
| CCND3 | NM_001760 | SEQ ID NO: 47 |
| CD44 | NM_001001389 | SEQ ID NO: 48 |
| CDC42 | NM_001791 | SEQ ID NO: 49 |
| CDH1 | NM_004360 | SEQ ID NO: 50 |
| CDH2 | NM_001792 | SEQ ID NO: 51 |
| CDH3 | NM_001793 | SEQ ID NO: 52 |
| CDH5 | NM_001795 | SEQ ID NO: 53 |
| CDKN1A | NM_078467 | SEQ ID NO: 54 |
| CDKN2A | NM_058195 | SEQ ID NO: 55 |
| CDKN2B | NM_004936 | SEQ ID NO: 56 |
| CER1 | NM_005454 | SEQ ID NO: 57 |
| CFL1 | NM_005507 | SEQ ID NO: 58 |
| CFL2 | NM_138638 | SEQ ID NO: 59 |
| CHD8 | NM_020920 | SEQ ID NO: 60 |
| CHUK | NM_001278 | SEQ ID NO: 61 |
| CLDN1 | NM_021101 | SEQ ID NO: 62 |
| COL4A1 | NM_001845 | SEQ ID NO: 63 |
| COL4A2 | NM_001846 | SEQ ID NO: 64 |
| COL4A3 | NM_031362 | SEQ ID NO: 65 |
| COL4A4 | NM_000092 | SEQ ID NO: 66 |
| COL4A5 | NM_033380 | SEQ ID NO: 67 |
| COL4A6 | NM_001847 | SEQ ID NO: 68 |
| CREBBP | NM_001079846 | SEQ ID NO: 69 |
| CRK | NM_005206 | SEQ ID NO: 70 |
| CSNK1A1 | NM_001025105 | SEQ ID NO: 71 |
| CSNK1A1L | NM_145203 | SEQ ID NO: 72 |
| CSNK1D | NM_001893 | SEQ ID NO: 73 |
| CSNK1E | NM_001894 | SEQ ID NO: 74 |
| CSNK1G1 | NM_022048 | SEQ ID NO: 75 |
| CSNK1G2 | NM_001319 | SEQ ID NO: 76 |
| CSNK1G3 | NM_001031812 | SEQ ID NO: 77 |
| CSNK2A1 | NM_177559 | SEQ ID NO: 78 |
| CSNK2A2 | NM_001896 | SEQ ID NO: 79 |
| CSNK2B | NM_001320 | SEQ ID NO: 80 |
| CTBP1 | NM_001328 | SEQ ID NO: 81 |
| CTBP2 | NM_001083914 | SEQ ID NO: 82 |
| CTNNB1 | NM_001098209 | SEQ ID NO: 83 |
| CTNNBIP1 | NM_020248 | SEQ ID NO: 84 |
| CUL1 | NM_003592 | SEQ ID NO: 85 |
| CXXC4 | NM_025212 | SEQ ID NO: 86 |
| DAAM1 | NM_014992 | SEQ ID NO: 87 |
| DAAM2 | NM_015345 | SEQ ID NO: 88 |
| DAB2 | NM_001343 | SEQ ID NO: 89 |
| DIXDC1 | NM_001037954 | SEQ ID NO: 90 |
| DKK1 | NM_012242 | SEQ ID NO: 91 |
| DKK2 | NM_014421 | SEQ ID NO: 92 |
| DKK3 | NM_013253 | SEQ ID NO: 93 |
| DKK4 | NM_014420 | SEQ ID NO: 94 |
| DKKL1 | NM_014419 | SEQ ID NO: 95 |
| DKKL2 | NM_005524.2 | SEQ ID NO: 96 |
| DOCK1 | NM_001380 | SEQ ID NO: 97 |
| DSTN | NM_001011546 | SEQ ID NO: 98 |
| DVL1 | NM_182779 | SEQ ID NO: 99 |
| DVL1L1 | Uncharacterized | SEQ ID NO: 100 |
| DVL2 | NM_004422 | SEQ ID NO: 101 |
| DVL3 | NM_004423 | SEQ ID NO: 102 |
| EIF4E | NM_001968 | SEQ ID NO: 103 |
| EIF4EBP1 | NM_004095 | SEQ ID NO: 104 |
| ENC1 | NM_003633 | SEQ ID NO: 105 |
| EP300 | NM_001429 | SEQ ID NO: 106 |
| FBXW11 | NM_012300 | SEQ ID NO: 107 |
| FBXW2 | NM_012164 | SEQ ID NO: 108 |
| FBXW4 | NM_022039 | SEQ ID NO: 109 |
| FGF4 | NM_002007 | SEQ ID NO: 110 |
| FN1 | NM_212478 | SEQ ID NO: 111 |
| FOSL1 | NM_005438 | SEQ ID NO: 112 |
| FOXN1 | NM_003593 | SEQ ID NO: 113 |
| FOXO3 | NM_201559 | SEQ ID NO: 114 |
| FRAP1 | NM_004958 | SEQ ID NO: 115 |
| FRAT1 | NM_005479 | SEQ ID NO: 116 |
| FRAT2 | NM_012083 | SEQ ID NO: 117 |
| FRZB | NM_001463 | SEQ ID NO: 118 |
| FSHB | NM_001018080 | SEQ ID NO: 119 |
| FZD1 | NM_003505 | SEQ ID NO: 120 |
| FZD10 | NM_007197 | SEQ ID NO: 121 |
| FZD2 | NM_001466 | SEQ ID NO: 122 |
| FZD3 | NM_017412 | SEQ ID NO: 123 |
| FZD4 | NM_012193 | SEQ ID NO: 124 |
| FZD5 | NM_003468 | SEQ ID NO: 125 |
| FZD6 | NM_003506 | SEQ ID NO: 126 |
| FZD7 | NM_003507 | SEQ ID NO: 127 |
| FZD8 | NM_031866 | SEQ ID NO: 128 |
| FZD9 | NM_003508 | SEQ ID NO: 129 |
| GAPDH | NM_002046 | SEQ ID NO: 130 |
| GAST | NM_000805 | SEQ ID NO: 131 |
| GJA1 | NM_000165 | SEQ ID NO: 132 |
| GNAO1 | NM_020988 | SEQ ID NO: 133 |
| GNAQ | NM_002072 | SEQ ID NO: 134 |
| GRB2 | NM_002086 | SEQ ID NO: 135 |
| GSK3A | NM_019884 | SEQ ID NO: 136 |
| GSK3B | NM_002093 | SEQ ID NO: 137 |
| HDAC1 | NM_004964 | SEQ ID NO: 138 |
| HNF1A | NM_000545 | SEQ ID NO: 139 |
| HRAS | NM_005343 | SEQ ID NO: 140 |
| HSP90AB1 | NM_007355 | SEQ ID NO: 141 |
| IKBKB | NM_001556 | SEQ ID NO: 142 |
| ILK | NM_001014794 | SEQ ID NO: 143 |
| ITGAD | NM_005353 | SEQ ID NO: 144 |
| ITGAL | NM_002209 | SEQ ID NO: 145 |
| ITGAM | NM_000632 | SEQ ID NO: 146 |
| ITGAW | Uncharacterized | |
| ITGAX | NM_000887 | SEQ ID NO: 147 |
| ITGB2 | NM_000211 | SEQ ID NO: 148 |
| JUN | NM_002228 | SEQ ID NO: 149 |
| KDR | NM_002253 | SEQ ID NO: 150 |
| KREMEN1 | NM_001039571 | SEQ ID NO: 151 |
| KREMEN2 | NM_172229 | SEQ ID NO: 152 |
| LAMA1 | NM_005559 | SEQ ID NO: 153 |
| LAMB1 | NM_002291 | SEQ ID NO: 154 |
| LAMC1 | NM_002293 | SEQ ID NO: 155 |
| LEF1 | NM_016269 | SEQ ID NO: 156 |
| LIMK2 | NM_005569 | SEQ ID NO: 157 |
| LRP1 | NM_002332 | SEQ ID NO: 158 |
| LRP5 | NM_002335 | SEQ ID NO: 159 |
| LRP6 | NM_002336 | SEQ ID NO: 160 |
| MAP2K1 | NM_002755 | SEQ ID NO: 161 |
| MAP2K2 | NM_030662 | SEQ ID NO: 162 |
| MAP2K3 | NM_145109 | SEQ ID NO: 163 |
| MAP3K11 | NM_002419 | SEQ ID NO: 164 |
| MAP3K7 | NM_003188 | SEQ ID NO: 165 |
| MAP3K7IP1 | NM_153497 | SEQ ID NO: 166 |
| MAP4K1 | NM_007181 | SEQ ID NO: 167 |
| MAPK1 | NM_002745 | SEQ ID NO: 168 |
| MAPK10 | NM_002753 | SEQ ID NO: 169 |
| MAPK11 | NM_002751 | SEQ ID NO: 170 |
| MAPK12 | NM_002969 | SEQ ID NO: 171 |
| MAPK13 | NM_002754 | SEQ ID NO: 172 |
| MAPK14 | NM_001315 | SEQ ID NO: 173 |
| MAPK3 | NM_001040056 | SEQ ID NO: 174 |
| MAPK8 | NM_002750 | SEQ ID NO: 175 |
| MAPK9 | NM_139068 | SEQ ID NO: 176 |
| MARK2 | NM_001039468 | SEQ ID NO: 177 |
| MARK4 | NM_031417 | SEQ ID NO: 178 |
| MDM2 | NM_002392 | SEQ ID NO: 179 |
| MESDC2 | NM_015154 | SEQ ID NO: 180 |
| MKNK1 | NM_003684 | SEQ ID NO: 181 |
| MMP13 | NM_002427 | SEQ ID NO: 182 |
| MMP26 | NM_021801 | SEQ ID NO: 183 |
| MMP7 | NM_002423 | SEQ ID NO: 184 |
| MRCL3 | NM_006471 | SEQ ID NO: 185 |
| MYC | NM_002467 | SEQ ID NO: 186 |
| MYL1 | NM_079420 | SEQ ID NO: 187 |
| MYL2 | NM_000432 | SEQ ID NO: 188 |
| MYL3 | NM_000258 | SEQ ID NO: 189 |
| MYL4 | NM_001002841 | SEQ ID NO: 190 |
| MYL5 | NM_002477 | SEQ ID NO: 191 |
| MYL6 | NM_021019 | SEQ ID NO: 192 |
| MYL6B | NM_002475 | SEQ ID NO: 193 |
| MYL7 | NM_021223 | SEQ ID NO: 194 |
| MYL9 | NM_006097 | SEQ ID NO: 195 |
| MYLK | NM_053026 | SEQ ID NO: 196 |
| MYLK2 | NM_033118 | SEQ ID NO: 197 |
| MYLK3 | NM_182493 | SEQ ID NO: 198 |
| NCL | NM_005381 | SEQ ID NO: 199 |
| NFAT5 | NM_138714 | SEQ ID NO: 200 |
| NFATC1 | NM_172388 | SEQ ID NO: 201 |
| NFATC2 | NM_173091 | SEQ ID NO: 202 |
| NFATC3 | NM_173165 | SEQ ID NO: 203 |
| NFATC4 | NM_004554 | SEQ ID NO: 204 |
| NKD1 | NM_033119 | SEQ ID NO: 205 |
| NKD2 | NM_033120 | SEQ ID NO: 206 |
| NLK | NM_016231 | SEQ ID NO: 207 |
| NRCAM | NM_001037132 | SEQ ID NO: 208 |
| PAK1 | NM_002576 | SEQ ID NO: 209 |
| PIK3CA | NM_006218 | SEQ ID NO: 210 |
| PIK3CB | NM_006219 | SEQ ID NO: 211 |
| PIK3CD | NM_005026 | SEQ ID NO: 212 |
| PIK3R1 | NM_181523 | SEQ ID NO: 213 |
| PIK3R2 | NM_005027 | SEQ ID NO: 214 |
| PIK3R3 | NM_003629 | SEQ ID NO: 215 |
| PIN1 | NM_006221 | SEQ ID NO: 216 |
| PITX2 | NM_153426 | SEQ ID NO: 217 |
| PLAT | NM_000930 | SEQ ID NO: 218 |
| PLAU | NM_002658 | SEQ ID NO: 219 |
| PLAUR | NM_001005376 | SEQ ID NO: 220 |
| PLCB1 | NM_182734 | SEQ ID NO: 221 |
| PLCB2 | NM_004573 | SEQ ID NO: 222 |
| PLCB3 | NM_000932 | SEQ ID NO: 223 |
| PLCB4 | NM_182797 | SEQ ID NO: 224 |
| PLG | NM_000301 | SEQ ID NO: 225 |
| PORCN | NM_203473 | SEQ ID NO: 226 |
| PPARD | NM_006238 | SEQ ID NO: 227 |
| PPM1A | NM_177952 | SEQ ID NO: 228 |
| PPM1J | NM_005167 | SEQ ID NO: 229 |
| PPM1L | NM_139245 | SEQ ID NO: 230 |
| PPP1CB | NM_206876 | SEQ ID NO: 231 |
| PPP1R12A | NM_002480 | SEQ ID NO: 232 |
| PPP2CA | NM_002715 | SEQ ID NO: 233 |
| PPP2CB | NM_001009552 | SEQ ID NO: 234 |
| PPP2R1A | NM_014225 | SEQ ID NO: 235 |
| PPP2R1B | NM_181699 | SEQ ID NO: 236 |
| PPP2R2A | NM_002717 | SEQ ID NO: 237 |
| PPP2R2B | NW_181678 | SEQ ID NO: 238 |
| PPP2R2C | NM_020416 | SEQ ID NO: 239 |
| PPP2R3A | NM_002718 | SEQ ID NO: 240 |
| PPP2R3B | NM_013239 | SEQ ID NO: 241 |
| PPP2R4 | NM_021131 | SEQ ID NO: 242 |
| PPP2R5A | NM_006243 | SEQ ID NO: 243 |
| PPP2R5B | NM_006244 | SEQ ID NO: 244 |
| PPP2R5C | NM_002719 | SEQ ID NO: 245 |
| PPP2R5D | NM_006245 | SEQ ID NO: 246 |
| PPP2R5E | NM_006246 | SEQ ID NO: 247 |
| PPP3CA | NM_000944 | SEQ ID NO: 248 |
| PPP3CB | NM_021132 | SEQ ID NO: 249 |
| PPP3CC | NM_005605 | SEQ ID NO: 250 |
| PPP3R1 | NM_000945 | SEQ ID NO: 251 |
| PPP3R2 | NM_147180 | SEQ ID NO: 252 |
| PRICKLE1 | NM_153026 | SEQ ID NO: 253 |
| PRICKLE2 | NM_198859 | SEQ ID NO: 254 |
| PRKACA | NM_002730 | SEQ ID NO: 255 |
| PRKACB | NM_002731 | SEQ ID NO: 256 |
| PRKACG | NM_002732 | SEQ ID NO: 257 |
| PRKCA | NM_002737 | SEQ ID NO: 258 |
| PRKCB1 | NM_212535 | SEQ ID NO: 259 |
| PRKCG | NM_002739 | SEQ ID NO: 260 |
| PRKX | NM_005044 | SEQ ID NO: 261 |
| PRKY | NM_002760 | SEQ ID NO: 262 |
| PSEN1 | NM_000021 | SEQ ID NO: 263 |
| PTK2 | NM_153831 | SEQ ID NO: 264 |
| PXN | NM_002859 | SEQ ID NO: 265 |
| PYGO1 | NM_015617 | SEQ ID NO: 266 |
| PYGO2 | NM_138300 | SEQ ID NO: 267 |
| RAC1 | NM_006908 | SEQ ID NO: 268 |
| RAC2 | NM_002872 | SEQ ID NO: 269 |
| RAC3 | NM_005052 | SEQ ID NO: 270 |
| RAF1 | NM_002880 | SEQ ID NO: 271 |
| RARA | NM_000964 | SEQ ID NO: 272 |
| RARB | NM_000965 | SEQ ID NO: 273 |
| RARG | NM_000966 | SEQ ID NO: 274 |
| RBX1 | NM_014248 | SEQ ID NO: 275 |
| REST | MM_005612 | SEQ ID NO: 276 |
| RHEB | NM_005614 | SEQ ID NO: 277 |
| RHOA | NM_001664 | SEQ ID NO: 278 |
| RHOU | NM_021205 | SEQ ID NO: 279 |
| ROCK1 | NM_005406 | SEQ ID NO: 280 |
| ROCK2 | NM_004850 | SEQ ID NO: 281 |
| RPS27A | NM_002954 | SEQ ID NO: 282 |
| RPS6KA5 | NM_004755 | SEQ ID NO: 283 |
| RUVBL1 | NM_003707 | SEQ ID NO: 284 |
| RUVBL2 | NM_006666 | SEQ ID NO: 285 |
| SENP2 | NM_021627 | SEQ ID NO: 286 |
| SERPINE1 | NM_000602 | SEQ ID NO: 287 |
| SERPING1 | NM_000062 | SEQ ID NO: 288 |
| SFRP1 | NM_003012 | SEQ ID NO: 289 |
| SFRP2 | NM_003013 | SEQ ID NO: 290 |
| SFRP4 | NM_003014 | SEQ ID NO: 291 |
| SFRP5 | NM_003015 | SEQ ID NO: 292 |
| SHC1 | NM_003029 | SEQ ID NO: 293 |
| SIAH1 | NM_003031 | SEQ ID NO: 294 |
| SKP1A | NM_003197 | SEQ ID NO: 295 |
| SLC9A3R1 | NM_004252 | SEQ ID NO: 296 |
| SMAD2 | NM_001003652 | SEQ ID NO: 297 |
| SMAD3 | NM_005902 | SEQ ID NO: 298 |
| SMAD4 | NM_005359 | SEQ ID NO: 299 |
| SMARCA4 | NM_003072 | SEQ ID NO: 300 |
| SMO | NM_005631 | SEQ ID NO: 301 |
| SOS1 | NM_005633 | SEQ ID NO: 302 |
| SOS2 | NM_006939 | SEQ ID NO: 303 |
| SOX1 | NM_005986 | SEQ ID NO: 304 |
| SOX10 | NM_006941 | SEQ ID NO: 305 |
| SOX11 | NM_003108 | SEQ ID NO: 306 |
| SOX12 | NM_006943 | SEQ ID NO: 307 |
| SOX13 | NM_005686 | SEQ ID NO: 308 |
| SOX14 | NM_004189 | SEQ ID NO: 309 |
| SOX15 | NM_006942 | SEQ ID NO: 310 |
| SOX17 | NM_022454 | SEQ ID NO: 311 |
| SOX18 | NM_018419 | SEQ ID NO: 312 |
| SOX2 | NM_003106 | SEQ ID NO: 313 |
| SOX3 | NM_005634 | SEQ ID NO: 314 |
| SOX4 | NM_003107 | SEQ ID NO: 315 |
| SOX5 | NM_152989 | SEQ ID NO: 316 |
| SOX6 | NM_033326 | SEQ ID NO: 317 |
| SOX7 | NM_031439 | SEQ ID NO: 318 |
| SOX8 | NM_014587 | SEQ ID NO: 319 |
| SOX9 | NM_000346 | SEQ ID NO: 320 |
| SP1 | NM_138473 | SEQ ID NO: 321 |
| SRC | NM_005417 | SEQ ID NO: 322 |
| T | NM_003181 | SEQ ID NO: 323 |
| TBL1X | NM_005647 | SEQ ID NO: 324 |
| TBL1XR1 | NM_024665 | SEQ ID NO: 325 |
| TBL1Y | NM_134258 | SEQ ID NO: 326 |
| TCF3 | NM_003200 | SEQ ID NO: 327 |
| TCF4 | NM_001083962 | SEQ ID NO: 328 |
| TCF7 | NM_003202 | SEQ ID NO: 329 |
| TCF7L1 | NM_031283 | SEQ ID NO: 330 |
| TCF7L2 | NM_030756 | SEQ ID NO: 331 |
| TGFB1 | NM_000660 | SEQ ID NO: 332 |
| TGFB2 | NM_003238 | SEQ ID NO: 333 |
| TGFB3 | NM_003239 | SEQ ID NO: 334 |
| TGFBR1 | NM_004612 | SEQ ID NO: 335 |
| TGFBR2 | NM_003242 | SEQ ID NO: 336 |
| TLE1 | NM_005077 | SEQ ID NO: 337 |
| TLE2 | NM_003260 | SEQ ID NO: 338 |
| TLE3 | NM_005078 | SEQ ID NO: 339 |
| TLE4 | NM_007005 | SEQ ID NO: 340 |
| TLN1 | NM_006289 | SEQ ID NO: 341 |
| TLN2 | NM_015059 | SEQ ID NO: 342 |
| TP53 | NM_000546 | SEQ ID NO: 343 |
| TSC2 | NM_001077183 | SEQ ID NO: 344 |
| UBB | NM_018955 | SEQ ID NO: 345 |
| UBC | NM_021009 | SEQ ID NO: 346 |
| UBD | NM_006398 | SEQ ID NO: 347 |
| VANGL1 | NM_138959 | SEQ ID NO: 348 |
| VANGL2 | NM_020335 | SEQ ID NO: 349 |
| VAV1 | NM_005428 | SEQ ID NO: 350 |
| VCL | NM_003373 | SEQ ID NO: 351 |
| VEGFA | NM_001025368 | SEQ ID NO: 352 |
| VIM | NM_003380 | SEQ ID NO: 353 |
| VTN | NM_000638 | SEQ ID NO: 354 |
| WASL | NM_003941 | SEQ ID NO: 355 |
| WIF1 | NM_007191 | SEQ ID NO: 356 |
| WISP1 | NM_003882 | SEQ ID NO: 357 |
| WISP2 | NM_003881 | SEQ ID NO: 358 |
| WNT1 | NM_005430 | SEQ ID NO: 359 |
| WNT10A | NM_025216 | SEQ ID NO: 360 |
| WNT10B | NM_003394 | SEQ ID NO: 361 |
| WNT11 | NM_004626 | SEQ ID NO: 362 |
| WNT16 | NM_016087 | SEQ ID NO: 363 |
| WNT2 | NM_003391 | SEQ ID NO: 364 |
| WNT2B | NM_004185 | SEQ ID NO: 365 |
| WNT3 | NM_030753 | SEQ ID NO: 366 |
| WNT3A | NM_033131 | SEQ ID NO: 367 |
| WNT4 | NM_030761 | SEQ ID NO: 368 |
| WNT5A | NM_003392 | SEQ ID NO: 369 |
| WNT5B | NM_030775 | SEQ ID NO: 370 |
| WNT6 | NM_006522 | SEQ ID NO: 371 |
| WNT7A | NM_004625 | SEQ ID NO: 372 |
| WNT7B | NM_058238 | SEQ ID NO: 373 |
| WNT8A | NM_058244 | SEQ ID NO: 374 |
| WNT8B | NM_003393 | SEQ ID NO: 375 |
| WNT9A | NM_003395 | SEQ ID NO: 376 |
| WNT9B | NM_003396 | SEQ ID NO: 377 |
| ZFYVE9 | NM_007324 | SEQ ID NO: 378 |

[0034] “Wnt/β-catenin agent,” “Wnt agent,” or “β-catenin agent” refers to a drug or agent modulates the canonical Wnt/β-catenin signaling pathway. A Wnt/β-catenin pathway inhibitor inhibits the canonical Wnt/β-catenin pathway signaling. Molecular targets of such agents may include β-catenin, TCF4, APC, axin, GSK3β, and any of the genes listed in Table 1. Such agents are known in the art and include, but are not limited to: thiazolidinediones (Wang et al., 2008, J. Surg. Res. Jun. 27, 2008 e-publication ahead of print); PKF115-584 (Doghman et al., 2008, J. Clin. Endocrinol. Metab. E-publication ahead of print, doi: 10.1210/jc.2008-0247); bis[2-(acylamino)phenyl]disulfide (Yamakawa et al., 2008, Biol Pharm. Bull. 31:916-920); FH535 (Handeli and Simon, 2008, Mol. Cancer Ther. 7:521-529); suldinac (Han et al., 2008, Eur. J. Pharmacol. 583:26-31); cyclooxygenase-2 inhibitor celecoxib (Tuynman et al., 2008, Cancer Res. 68:1213-1220); reverse-turn mimetic compounds (U.S. Pat. No. 7,232,822); β-catenin inhibitor compound 1 (WO2005021025); fusicoccin analog (WO2007062243); and FZD10 modulators (WO2008061020). The siRNA agents against target genes listed in the Examples that passed the tertiary validation screen are also exemplary Wnt/β-catenin pathway agents (see also Table 5).

[0035] The term “deregulated Wnt/β-catenin pathway” is used herein to mean that the Wnt/β-catenin signaling pathway is either hyperactivated or hypoactivated. A Wnt/β-catenin signaling pathway is hyperactivated in a sample (for example, a tumor sample) if it has at least 10%, 20%, 30%, 40%, 50%, 75%, 100%, 200%, 500%, 1000% greater activity/signaling than the Wnt/β-catenin signaling pathway in a normal (regulated) sample. A Wnt/β-catenin signaling pathway is hypoactivated if it has at least 10%, 20%, 30%, 40%, 50%, 75%, 100% less activity/signaling in a sample (for example, a tumor sample) than the Wnt/β-catenin signaling pathway in a normal (regulated) sample. The normal sample with the regulated Wnt/β-catenin signaling pathway may be from adjacent normal tissue, may be other tumor samples which do not have deregulated Wnt/β-catenin signaling, or may be a pool of samples. Alternatively, comparison of samples' Wnt/β-catenin signaling pathway status may be done with identical samples which have been treated with a drug or agent vs. vehicle. The change in activation status may be due to a mutation of one or more genes in the Wnt/β-catenin signaling pathway (such as point mutations, deletion, or amplification), changes in transcriptional regulation (such as methylation, phosphorylation, or acetylation changes), or changes in protein regulation (such as translation or post-translational control mechanisms).

[0036] The term “oncogenic pathway” is used herein to mean a pathway that when hyperactivated or hypoactivated contributes to cancer initiation or progression. In one embodiment, an oncogenic pathway is one that contains an oncogene or a tumor suppressor gene.

[0037] The term “treating” in its various grammatical forms in relation to the present invention refers to preventing (i.e. chemoprevention), curing, reversing, attenuating, alleviating, minimizing, suppressing, or halting the deleterious effects of a disease state, disease progression, disease causative agent (e.g. bacteria or viruses), or other abnormal condition. For example, treatment may involve alleviating a symptom (i.e., not necessarily all the symptoms) of a disease of attenuating the progression of a disease.

[0038] “Treatment of cancer,” as used herein, refers to partially or totally inhibiting, delaying, or preventing the progression of cancer including cancer metastasis; inhibiting, delaying, or preventing the recurrence of cancer including cancer metastasis; or preventing the onset or development of cancer (chemoprevention) in a mammal, for example, a human. In addition, the methods of the present invention may be practiced for the treatment of human patients with cancer. However, it is also likely that the methods would also be effective in the treatment of cancer in other mammals.

[0039] As used herein, the term “therapeutically effective amount” is intended to qualify the amount of the treatment in a therapeutic regiment necessary to treat cancer. This includes combination therapy involving the use of multiple therapeutic agents, such as a combined amount of a first and second treatment where the combined amount will achieve the desired biological response. The desired biological response is partial or total inhibition, delay, or prevention of the progression of cancer including cancer metastasis; inhibition, delay, or prevention of the recurrence of cancer including cancer metastasis; or the prevention of the onset of development of cancer (chemoprevention) in a mammal, for example, a human.

[0040] “Displaying or outputting a classification result, prediction result, or efficacy result” means that the results of a gene expression based sample classification or prediction are communicated to a user using any medium, such as for example, orally, writing, visual display, etc., computer readable medium or computer system. It will be clear to one skilled in the art that outputting the result is not limited to outputting to a user or a linked external component(s), such as a computer system or computer memory, but may alternatively or additionally be outputting to internal components, such as any computer readable medium. Computer readable media may include, but are not limited to hard drives, floppy disks, CD-ROMs, DVDs, DATs. Computer readable media does not include carrier waves or other wave forms for data transmission. It will be clear to one skilled in the art that the various sample classification methods disclosed and claimed herein, can, but need not be, computer-implemented, and that, for example, the displaying or outputting step can be done by, for example, by communicating to a person orally or in writing (e.g., in handwriting).

### 3.3 BIOMARKERS USEFUL IN CLASSIFYING SUBJECTS AND PREDICTING RESPONSE TO THERAPEUTIC AGENTS

### 3.3.1 Biomarker Sets

[0041] One aspect of the invention provides a set of 38 biomarkers whose expression is correlated with Wnt/β-catenin signaling pathway deregulation by clustering analysis. These biomarkers identified as useful for classifying subjects according to regulation status of the Wnt/β-catenin signaling pathway, predicting response of a subject to a compound that modulates the Wnt/β-catenin signaling pathway, measuring pharmacodynamic effect on the Wnt/β-catenin signaling pathway of a therapeutic agent, or measuring are listed as SEQ ID NOs: 388-425 (see also Table 3). Another aspect of the invention provides a method of using these biomarkers to distinguish tumor types in diagnosis or to predict response to therapeutic agents. Yet other aspects of the invention provide methods of using these biomarkers as pharmacodynamic biomarkers, i.e. monitoring pathway inhibition in patient tumors or peripheral tissues post-treatment; as response prediction biomarkers, i.e. prospectively identifying patients harboring tumors that have high levels of a particular pathway activity before treating the patients with inhibitors targeting the pathway; and as early efficacy biomarkers, i.e. an early readout of efficacy. In one embodiment of the invention, the 38 biomarker set may be split into two opposing “arms”—the “up” arm (see Table 4a), which are the genes that are upregulated, and the “down” arm (see Table 4b), which are the genes that are downregulated, as signaling through the Wnt/β-catenin pathway increases.

[0042] In one embodiment, the invention provides a set of 38 biomarkers that can classify subjects by Wnt/β-catenin signaling pathway regulation status, i.e. distinguish between subjects having regulated and deregulated Wnt/β-catenin signaling pathways. These biomarkers are listed in Table 3. The invention also provides subsets of at least 5, 10, 15, 20, 25, 30, 35 biomarkers, drawn from the set of 38, that can distinguish between subjects having deregulated and regulated Wnt/β-catenin signaling pathways. Alternatively, a subset of at least 3, 5, 10, or 15 biomarkers, drawn from the “up” arm (see Table 4a) and a subset of at least 3, 5, 10, or 15 biomarkers from the “down” arm (see Table 4b) that can distinguish between subjects having deregulated and regulated Wnt/β-catenin signaling pathways. The invention also provides a method of using the above biomarkers to distinguish between subjects having deregulated or regulated Wnt/β-catenin signaling pathway.

[0043] In another embodiment, the invention provides a set of 38 biomarkers that can be used to predict response of a subject to a Wnt/β-catenin signaling pathway agent. In a more specific embodiment, the invention provides a subset of at least 5, 10, 15, 20, 25, 30, or 35 biomarkers, drawn from the set of 38, that can be used to predict the response of a subject to an agent that modulates the Wnt/β-catenin signaling pathway. In another embodiment, the invention provides a set of 38 biomarkers that can be used to select a Wnt/β-catenin pathway agent for treatment of a subject with cancer. In a more specific embodiment, the invention provides a subset of at least 5, 10, 15, 20, 25, 30, or 35 biomarkers, drawn from the set of 38 that can be used to select a Wnt/β-catenin pathway agent for treatment of a subject with cancer. Alternatively, a subset of at least 3, 5, 10, or 15 biomarkers, drawn from the “up” arm (see Table 4a) and a subset of at least 3, 5, 10, or 15 biomarkers from the “down” arm (see Table 4b) can be used to predict response of a subject to a Wnt/β-catenin signaling pathway agent or to select a Wnt/β-catenin signaling pathway agent for treatment of a subject with cancer.

[0044] In another embodiment, the invention provides a set of 38 genetic biomarkers that can be used to determine whether an agent has a pharmacodynamic effect on the Wnt/β-catenin signaling pathway in a subject. The biomarkers provided may be used to monitor inhibition of the Wnt/β-catenin signaling pathway at various time points following treatment of a subject with said agent. In a more specific embodiment, the invention provides a subset of at least 5, 10, 15, 20, 25, 30, or 35 biomarkers, drawn from the set of 38 that can be used to monitor pharmacodynamic activity of an agent on the Wnt/β-catenin signaling pathway. Alternatively, a subset of at least 3, 5, 10, or 15 biomarkers, drawn from the “up” arm (see Table 4a) and a subset of at least 3, 5, 10, or 15 biomarkers from the “down” arm (see Table 4b) can be used to determine whether an agent has a pharmacodynamic effect on the Wnt/β-catenin signaling pathway or monitor pharmacodynamic activity of an agent on the Wnt/β-catenin signaling pathway.

[0045] Any of the sets of biomarkers provided above may be used alone specifically or in combination with biomarkers outside the set. For example, biomarkers that distinguish Wnt/β-catenin pathway regulation status may be used in combination with biomarkers that distinguish growth factor signaling pathway regulation status (see provisional applications by James Watters et al., filed on Mar. 22, 2008, application No. 61/070,368; filed on May 16, 2008, application No. 61/128,001; filed on Jun. 20, 2008, application No. 61/132,649) or p53 functional status (see provisional application, “Gene Expression Signature for Assessing p53 Pathway Functional Status,” by Andrey Loboda et al., filed on Mar. 22, 2008, application No. 61/070,259). Any of the biomarker sets provided above may also be used in combination with other biomarkers for cancer, or for any other clinical or physiological condition.

### 3.3.2 Identification of the Biomarkers

[0046] The present invention provides sets of biomarkers for the identification of conditions or indications associated with deregulated Wnt/β-catenin signaling pathway. Generally, the biomarker sets were identified by determining which of ˜44,000 human biomarkers had expression patterns that correlated with the conditions or indications.

[0047] In one embodiment, the method for identifying biomarker sets is as follows. After extraction and labeling of target polynucleotides, the expression of all biomarkers (genes) in a sample X is compared to the expression of all biomarkers in a standard or control. In one embodiment, the standard or control comprises target polynucleotides derived from a sample from a normal individual (i.e. an individual not having Wnt/β-catenin pathway deregulation). Alternatively, the standard or control comprises polynucleotides derived from normal tissue adjacent to a tumor or from tumors not having Wnt/β-catenin pathway deregulation. In a preferred embodiment, the standard or control is a pool of target polynucleotide molecules. The pool may be derived from collected samples from a number of normal individuals. In another embodiment, the pool comprises samples taken from a number of individuals with tumors not having Wnt/β-catenin pathway deregulation. In another preferred embodiment, the pool comprises an artificially-generated population of nucleic acids designed to approximate the level of nucleic acid derived from each biomarker found in a pool of biomarker-derived nucleic acids derived from tumor samples. In yet another embodiment, the pool is derived from normal or cancer lines or cell line samples.

[0048] The comparison may be accomplished by any means known in the art. For example, expression levels of various biomarkers may be assessed by separation of target polynucleotide molecules (e.g. RNA or cDNA) derived from the biomarkers in agarose or polyacrylamide gels, followed by hybridization with biomarker-specific oligonucleotide probes. Alternatively, the comparison may be accomplished by the labeling of target polynucleotide molecules followed by separation on a sequencing gel. Polynucleotide samples are placed on the gel such that patient and control or standard polynucleotides are in adjacent lanes. Comparison of expression levels is accomplished visually or by means of densitometer. In a preferred embodiment, the expression of all biomarkers is assessed simultaneously by hybridization to a microarray. In each approach, biomarkers meeting certain criteria are identified as associated with tumors having Wnt/β-catenin signaling pathway deregulation.

[0049] A biomarker is selected based upon significant difference of expression in a sample as compared to a standard or control condition. Selection may be made based upon either significant up- or down regulation of the biomarker in the patient sample. Selection may also be made by calculation of the statistical significance (i.e., the p-value) of the correlation between the expression of the biomarker and the condition or indication. Preferably, both selection criteria are used. Thus, in one embodiment of the invention, biomarkers associated with deregulation Wnt/β-catenin signaling pathway in a tumor are selected where the biomarkers show both more than two-fold change (increase or decrease) in expression as compared to a standard, and the p-value for the correlation between the existence of Wnt/β-catenin pathway deregulation and the change in biomarker expression is no more than 0.01 (i.e., is statistically significant).

[0050] Expression profiles comprising a plurality of different genes in a plurality of N cancer tumor samples can be used to identify markers that correlate with, and therefore are useful for discriminating different clinical categories. In a specific embodiment, a correlation coefficient ρ between a vector \vec{c} representing clinical categories or clinical parameters, e.g., a regulated or deregulated Wnt/β-catenin signaling pathway, in the N tumor samples and a vector \vec{r} representing the measured expression levels of a gene in the N tumor samples is used as a measure of the correlation between the expression level of the gene and Wnt/β-catenin signaling pathway status. The expression levels can be a measured abundance level of a transcript of the gene, or any transformation of the measured abundance, e.g., a logarithmic or a log ratio. Specifically, the correlation coefficient may be calculated as:

ρ=(\vec{c}·\vec{r})/(∥\vec{c}∥·∥\vec{r}∥) (1)

[0051] Biomarkers for which the coefficient of correlation exceeds a cutoff are identified as Wnt/β-catenin pathway signaling status-informative biomarkers specific for a particular clinical category, e.g., deregulated Wnt/β-catenin pathway signaling status, within a given patient subset. Such a cutoff or threshold may correspond to a certain significance of the set of obtained discriminating genes. The threshold may also be selected based on the number of samples used. For example, a threshold can be calculated as 3×1/\sqrt{n−3}, where 1/\sqrt{n−3} is the distribution width and the number of samples. In a specific embodiment, markers are chosen if the correlation coefficient is greater than about 0.3 or less than about −0.3.

[0052] Next, the significance of the set of biomarker genes can be evaluated. The significance may be calculated by any appropriate statistical method. In a specific example, a Monte-Carlo technique is used to randomize the association between the expression profiles of the plurality of patients and the clinical categories to generate a set of randomized data. The same biomarker selection procedure as used to select the biomarker set is applied to the randomized data to obtain a control biomarker set. A plurality of such runs can be performed to generate a probability distribution of the number of genes in control biomarker sets. In a preferred embodiment, 10,000 such runs are performed. From the probability distribution, the probability of finding a biomarker set consisting of a given number of biomarkers when no correlation between the expression levels and phenotype is expected (i.e., based randomized data) can be determined. The significance of the biomarker set obtained from the real data can be evaluated based on the number of biomarkers in the biomarker set by comparing to the probability of obtaining a control biomarker set consisting of the same number of biomarkers using the randomized data. In one embodiment, if the probability of obtaining a control biomarker set consisting of the same number of biomarkers using the randomized data is below a given probability threshold, the biomarker set is said to be significant.

[0053] Once a biomarker set is identified, the biomarkers may be rank-ordered in order of correlation or significance of discrimination. One means of rank ordering is by the amplitude of correlation between the change in gene expression of the biomarker and the specific condition being discriminated. Another, preferred, means is to use a statistical metric. In a specific embodiment, the metric is a t-test-like statistic:

$$t = \frac{( 〈 {x}_{1} 〉 - 〈 {x}_{2} 〉 )}{\sqrt{[ {σ}_{1}^{2} ( {n}_{1} - 1 ) + {σ}_{2}^{2} ( {n}_{2} - 1 ) ] / ( {n}_{1} + {n}_{2} - 1 ) / ( 1 / {n}_{1} + 1 / {n}_{2} )}} \qquad ( 2 )$$

[0054] In this equation, [symbol] x₁ [symbol] is the error-weighted average of the log ratio of transcript expression measurements within a first clinical group (e.g., deregulated Wnt/β-catenin pathway signaling), [symbol] x₂ [symbol] is the error-weighted average of log ratio within a second, related clinical group (e.g., regulated Wnt/β-catenin pathway signaling), σ₁ is the variance of the log ratio within the first clinical group (e.g., deregulated Wnt/β-catenin pathway signaling), n₁ is the number of samples for which valid measurements of log ratios are available, σ₂ is the variance of log ratio within the second clinical group (e.g., regulated Wnt/β-catenin pathway signaling), and n₂ is the number of samples for which valid measurements of log ratios are available. The t-value represents the variance-compensated difference between two means. The rank-ordered biomarker set may be used to optimize the number of biomarkers in the set used for discrimination.

[0055] A set of genes for Wnt/β-catenin pathway signaling status can also be identified using an iterative approach. This is accomplished generally in a “leave one out” method as follows. In a first run, a subset, for example five, of the biomarkers from the top of the ranked list is used to generate a template, where out of N samples, N−1 are used to generate the template, and the status of the remaining sample is predicted. This process is repeated for every sample until every one of the N samples is predicted once. In a second run, one or more additional biomarkers, for example five additional biomarkers, are added, so that a template is now generated from 10 biomarkers, and the outcome of the remaining sample is predicted. This process is repeated until the entire set of biomarkers is used to generate the template. For each of the runs, type 1 error (false negative) and type 2 errors (false positive) are counted. The set of top-ranked biomarkers that corresponds to lowest type 1 error rate, or type 2 error rate, or preferably the total of type 1 and type 2 error rate is selected.

[0056] For Wnt/β-catenin pathway signaling status biomarkers, validation of the marker set may be accomplished by an additional statistic, a survival model. This statistic generates the probability of tumor distant metastases as a function of time since initial diagnosis. A number of models may be used, including Weibull, normal, log-normal, log logistic, log-exponential, or log-Rayleigh (Chapter 12 “Life Testing”, S-PLUS 2000 GUIDE TO STATISTICS, Vol. 2, p. 368 (2000)). For the “normal” model, the probability of distant metastases P at time t is calculated as

P=α×exp(−t²/τ²) (3)

where α is fixed and equal to 1, τ and is a parameter to be fitted and measures the “expected lifetime”.

[0057] It is preferable that the above biomarker identification process be iterated one or more times by excluding one or more samples from the biomarker selection or ranking (i.e., from the calculation of correlation). Those samples being excluded are the ones that can not be predicted correctly from the previous iteration. Preferably, those samples excluded from biomarker selection in this iteration process are included in the classifier performance evaluation, to avoid overstating the performance.

[0058] Once a set of genes for Wnt/β-catenin pathway signaling status has been identified, the biomarkers may be split into two opposing “arms” —the “up” arm (see Table 4a), which are the genes that are upregulated, and the “down” arm (see Table 4b), which are the genes that are downregulated, as signaling through the Wnt/β-catenin pathway increases.

[0059] It will be apparent to those skilled in the art that the above methods, in particular the statistical methods, described above, are not limited to the identification of biomarkers associated with Wnt/β-catenin signaling pathway regulation status, but may be used to identify set of biomarker genes associated with any phenotype. The phenotype can be the presence or absence of a disease such as cancer, or the presence or absence of any identifying clinical condition associated with that cancer. In the disease context, the phenotype may be prognosis such as survival time, probability of distant metastases of disease condition, or likelihood of a particular response to a therapeutic or prophylactic regimen. The phenotype need not be cancer, or a disease; the phenotype may be a nominal characteristic associated with a healthy individual.

### 3.3.3 Sample Collection

[0060] In the present invention, target polynucleotide molecules are typically extracted from a sample taken from an individual afflicted with cancer or tumor cell lines, and corresponding normal/control tissues or cell lines, respectively. Samples may also be taken from primary cell lines or ex vivo cultures of cells taken from an animal or patient. The sample may be collected in any clinically acceptable manner, but must be collected such that biomarker-derived polynucleotides (i.e., RNA) are preserved. mRNA or nucleic acids derived therefrom (i.e., cDNA or amplified DNA) are preferably labeled distinguishably from standard or control polynucleotide molecules, and both are simultaneously or independently hybridized to a microarray comprising some or all of the biomarkers or biomarker sets or subsets described above. Alternatively, mRNA or nucleic acids derived therefrom may be labeled with the same label as the standard or control polynucleotide molecules, wherein the intensity of hybridization of each at a particular probe is compared. A sample may comprise any clinically relevant tissue sample, such as a tumor biopsy, fine needle aspirate, or hair follicle, or a sample of bodily fluid, such as blood, plasma, serum, lymph, ascitic fluid, cystic fluid, urine. The sample may be taken from a human, or, in a veterinary context, from non-human animals such as ruminants, horses, swine or sheep, or from domestic companion animals such as felines and canines. Additionally, the samples may be from frozen or archived formalin-fixed, paraffin-embedded (FFPE) tissue samples.

[0061] Methods for preparing total and poly(A)+ RNA are well known and are described generally in Sambrook et al., MOLECULAR CLONING—A LABORATORY MANUAL (2ND ED.), Vols. 1-3, Cold Spring Harbor Laboratory, Cold Spring Harbor, N.Y. (1989)) and Ausubel et al., CURRENT PROTOCOLS IN MOLECULAR BIOLOGY, vol. 2, Current Protocols Publishing, New York (1994)).

[0062] RNA may be isolated from eukaryotic cells by procedures that involve lysis of the cells and denaturation of the proteins contained therein. Cells of interest include wild-type cells (i.e., non-cancerous), drug-exposed wild-type cells, tumor- or tumor-derived cells, modified cells, normal or tumor cell line cells, and drug-exposed modified cells.

[0063] Additional steps may be employed to remove DNA. Cell lysis may be accomplished with a nonionic detergent, followed by microcentrifugation to remove the nuclei and hence the bulk of the cellular DNA. In one embodiment, RNA is extracted from cells of the various types of interest using guanidinium thiocyanate lysis followed by CsCl centrifugation to separate the RNA from DNA (Chirgwin et al., Biochemistry 18:5294-5299 (1979)). Poly(A)+ RNA is selected by selection with oligo-dT cellulose (see Sambrook et al, MOLECULAR CLONING—A LABORATORY MANUAL (2ND ED.), Vols. 1-3, Cold Spring Harbor Laboratory, Cold Spring Harbor, N.Y. (1989). Alternatively, separation of RNA from DNA can be accomplished by organic extraction, for example, with hot phenol or phenol/chloroform/isoamyl alcohol.

[0064] If desired, RNase inhibitors may be added to the lysis buffer. Likewise, for certain cell types, it may be desirable to add a protein denaturation/digestion step to the protocol.

[0065] For many applications, it is desirable to preferentially enrich mRNA with respect to other cellular RNAs, such as transfer RNA (tRNA) and ribosomal RNA (rRNA). Most mRNAs contain a poly(A) tail at their 3′ end. This allows them to be enriched by affinity chromatography, for example, using oligo(dT) or poly(U) coupled to a solid support, such as cellulose or Sephadex® (see Ausubel et al., CURRENT PROTOCOLS IN MOLECULAR BIOLOGY, vol. 2, Current Protocols Publishing, New York (1994). Once bound, poly(A)+ mRNA is eluted from the affinity column using 2 mM EDTA/0.1% SDS.

[0066] The sample of RNA can comprise a plurality of different mRNA molecules, each different mRNA molecule having a different nucleotide sequence. In a specific embodiment, the mRNA molecules in the RNA sample comprise at least 100 different nucleotide sequences. More preferably, the mRNA molecules of the RNA sample comprise mRNA molecules corresponding to each of the biomarker genes. In another specific embodiment, the RNA sample is a mammalian RNA sample.

[0067] In a specific embodiment, total RNA or mRNA from cells is used in the methods of the invention. The source of the RNA can be cells of a plant or animal, human, mammal, primate, non-human animal, dog, cat, mouse, rat, bird, yeast, eukaryote, prokaryote, etc. In specific embodiments, the method of the invention is used with a sample containing total mRNA or total RNA from 1×10⁶ cells or less. In another embodiment, proteins can be isolated from the foregoing sources, by methods known in the art, for use in expression analysis at the protein level.

[0068] Probes to the homologs of the biomarker sequences disclosed herein can be employed preferably wherein non-human nucleic acid is being assayed.

### 3.4 METHODS OF USING WNT/β-CATENIN PATHWAY DEREGULATION BIOMARKER SETS

### 3.4.1 Diagnostic/Sample Classification Methods

[0069] The invention provides for methods of using the biomarker sets to analyze a sample from an individual or subject so as to determine or classify the subject's sample at a molecular level, whether a sample has a deregulated or regulated Wnt/β-catenin pathway. The sample may or may not be derived from a tumor. The individual need not actually be afflicted with cancer. Essentially, the expression of specific biomarker genes in the individual, or a sample taken therefrom, is compared to a standard or control. For example, assume two cancer-related conditions, X and Y. One can compare the level of expression of Wnt/β-catenin pathway biomarkers for condition X in an individual to the level of the biomarker-derived polynucleotides in a control, wherein the level represents the level of expression exhibited by samples having condition X. In this instance, if the expression of the markers in the individual's sample is substantially (i.e., statistically) different from that of the control, then the individual does not have condition X. Where, as here, the choice is bimodal (i.e. a sample is either X or Y), the individual can additionally be said to have condition Y. Of course, the comparison to a control representing condition Y can also be performed. Preferably, both are performed simultaneously, such that each control acts as both a positive and a negative control. The distinguishing result may thus either be a demonstrable difference from the expression levels (i.e. the amount of marker-derived RNA, or polynucleotides derived therefrom) represented by the control, or no significant difference.

[0070] Thus, in one embodiment, the method of determining a particular tumor-related status of an individual comprises the steps of (1) hybridizing labeled target polynucleotides from an individual to a microarray containing the above biomarker set or a subset of the biomarkers; (2) hybridizing standard or control polynucleotide molecules to the microarray, wherein the standard or control molecules are differentially labeled from the target molecules; and (3) determining the difference in transcript levels, or lack thereof, between the target and standard or control, wherein the difference, or lack thereof, determines the individual's tumor-related status. In a more specific embodiment, the standard or control molecules comprise biomarker-derived polynucleotides from a pool of samples from normal individuals, a pool of samples from normal adjacent tissue, or a pool of tumor samples from individuals with cancer. In a preferred embodiment, the standard or control is artificially-generated pool of biomarker-derived polynucleotides, which pool is designed to mimic the level of biomarker expression exhibited by clinical samples of normal or cancer tumor tissue having a particular clinical indication (i.e. cancerous or non-cancerous; Wnt/β-catenin pathway regulated or deregulated). In another specific embodiment, the control molecules comprise a pool derived from normal or cancer cell lines.

[0071] The present invention provides a set of biomarkers useful for distinguishing deregulated from regulated Wnt/β-catenin pathway tumor types. Thus, in one embodiment of the above method, the level of polynucleotides (i.e., mRNA or polynucleotides derived therefrom) in a sample from an individual, expressed from the biomarkers provided in Table 3 are compared to the level of expression of the same biomarkers from a control, wherein the control comprises biomarker-related polynucleotides derived from deregulated Wnt/β-catenin signaling pathway tumor samples, regulated Wnt/β-catenin signaling pathway tumor samples, or both. The comparison may be to both deregulated and regulated Wnt/β-catenin signaling pathway tumor samples, and the comparison may be to polynucleotide pools from a number of deregulated and regulated Wnt/β-catenin signaling pathway tumor samples, respectively. Where the individual's biomarker expression most closely resembles or correlates with the deregulated control, and does not resemble or correlate with the regulated control, the individual is classified as having a deregulated Wnt/β-catenin signaling pathway. Where the pool is not pure deregulated or regulated Wnt/β-catenin signaling pathway type tumors samples, for example, a sporadic pool is used, a set of experiments using individuals with known Wnt/β-catenin signaling pathway status may be hybridized against the pool in order to define the expression templates for the deregulated and regulated group. Each individual with unknown Wnt/β-catenin signaling pathway status is hybridized against the same pool and the expression profile is compared to the template(s) to determine the individual's Wnt/β-catenin signaling pathway status.

[0072] In another specific embodiment, the method comprises:

[0073] (i) calculating a measure of similarity between a first expression profile and a deregulated Wnt/β-catenin signaling pathway template, or calculating a first measure of similarity between said first expression profile and said deregulated Wnt/β-catenin signaling pathway template and a second measure of similarity between said first expression profile and a regulated Wnt/β-catenin signaling pathway template, said first expression profile comprising the expression levels of a first plurality of genes in the cell sample, said deregulated Wnt/β-catenin signaling pathway template comprising expression levels of said first plurality of genes that are average expression levels of the respective genes in a plurality of cell samples having at least one or more components of said Wnt/β-catenin signaling pathway with abnormal activity, and said regulated Wnt/β-catenin signaling pathway template comprising expression levels of said first plurality of genes that are average expression levels of the respective genes in a plurality of cell samples not having at least one or more components of said Wnt/β-catenin signaling pathway with abnormal activity, said first plurality of genes consisting of at least 5 of the genes for which biomarkers are listed in Table 3;

[0074] (ii) classifying said cell sample as having said deregulated Wnt/β-catenin signaling pathway if said first expression profile has a high similarity to said deregulated Wnt/β-catenin signaling pathway template or has a higher similarity to said deregulated Wnt/β-catenin signaling pathway template than to said regulated Wnt/β-catenin signaling pathway template, or classifying said cell sample as having said regulated Wnt/β-catenin signaling pathway if said first expression profile has a low similarity to said deregulated Wnt/β-catenin signaling pathway template or has a higher similarity to said regulated Wnt/β-catenin signaling pathway template than to said deregulated Wnt/β-catenin signaling pathway template; wherein said first expression profile has a high similarity to said deregulated Wnt/β-catenin signaling pathway template if the similarity to said deregulated Wnt/β-catenin signaling pathway template is above a predetermined threshold, or has a low similarity to said deregulated Wnt/β-catenin signaling pathway template if the similarity to said deregulated Wnt/β-catenin signaling pathway template is below said predetermined threshold; and

[0075] (iii) displaying; or outputting to a user interface device, a computer readable storage medium, or a local or remote computer system; the classification produced by said classifying step (ii).

[0076] In another specific embodiment, the set of biomarkers may be used to classify a sample from a subject by the Wnt/β-catenin signaling pathway regulation status. The sample may or may not be derived from a tumor. Thus, in one embodiment of the above method, the level of polynucleotides (i.e., mRNA or polynucleotides derived therefrom) in a sample from an individual, expressed from the biomarkers provided in Table 3 are compared to the level of expression of the same biomarkers from a control, wherein the control comprises biomarker-related polynucleotides derived from deregulated Wnt/β-catenin signaling pathway samples, regulated Wnt/β-catenin signaling pathway samples, or both. The comparison may be to both deregulated and regulated Wnt/β-catenin signaling pathway samples, and the comparison may be to polynucleotide pools from a number of deregulated and regulated Wnt/β-catenin signaling pathway samples, respectively. The comparison may also be made to a mixed pool of samples with deregulated and regulated Wnt/β-catenin signaling pathway or unknown samples.

[0077] For the above embodiments, the fullest of biomarkers may be used (i.e., the complete set of biomarkers from Table 3). In other embodiments, subsets of the 38 biomarkers may be used or subsets of the “up” (Table 4a) and “down” (Table 4b) arms of the biomarkers may be used.

[0078] In another embodiment, the expression profile is a differential expression profile comprising differential measurements of said plurality of genes in a sample derived from a subject versus measurements of said plurality of genes in a control sample. The differential measurements can be xdev, log(ratio), error-weighted log(ratio), or a mean subtracted log(intensity) (see, e.g., PCT publication WO00/39339, published on Jul. 6, 2000; PCT publication WO2004/065545, published Aug. 5, 2004, each of which is incorporated herein by reference in its entirety).

[0079] The similarity between the biomarker expression profile of a sample or an individual and that of a control can be assessed a number of ways using any method known in the art. For example, Dai et al. describe a number of different ways of calculating gene expression templates and corresponding biomarker genets useful in classifying breast cancer patients (U.S. Pat. No. 7,171,311; WO2002/103320; WO2005/086891; WO2006015312; WO2006/084272). Similarly, Linsley et al. (US2003/0104426) and Radish et al. (US20070154931) disclose gene biomarker genesets and methods of calculating gene expression templates useful in classifying chronic myelogenous leukemia patients. In the simplest case, the profiles can be compared visually in a printout of expression difference data. Alternatively, the similarity can be calculated mathematically.

[0080] In one embodiment, the similarity measure between two patients (or samples) x and y, or patient (or sample) x and a template y, can be calculated using the following equation:

$$S = 1 - [ \begin{matrix}{\sum }_{i = 1}^{{N}_{v}} \frac{( {x}_{i} - \overline{x} )}{{σ}_{{x}_{i}}} \frac{( {y}_{i} - \overline{y} )}{{σ}_{{y}_{i}}} / \\ \sqrt{{\sum }_{i = 1}^{{N}_{v}} {( \frac{( {x}_{i} - \overline{x} )}{{σ}_{{x}_{i}}} )}^{2} {\sum }_{i = 1}^{{N}_{v}} {( \frac{( {y}_{i} - \overline{y} )}{{σ}_{{y}_{i}}} )}^{2}}\end{matrix} ] \qquad ( 4 )$$

In this equation, χ and y are two patients with components of log ratio xᵢ and yᵢ, i=1, 2, . . . , N=4,986. Associated with every value xᵢ is error σₓ_{ᵢ}. The smaller the value σₓ_{ᵢ}, the more reliable the measurement xᵢ.

$$\overline{x} = {\sum }_{i = 1}^{{N}_{v}} \frac{{x}_{i}}{{σ}_{{x}_{i}}^{2}} / {\sum }_{i = 1}^{{N}_{v}} \frac{1}{{σ}_{{x}_{i}}^{2}}$$

is the error-weighted arithmetic mean.

[0081] In one embodiment, the similarity is represented by a correlation coefficient between the patient or sample profile and the template. In one embodiment, a correlation coefficient above a correlation threshold indicates high similarity, whereas a correlation coefficient below the threshold indicates low similarity. In some embodiments, the correlation threshold is set as 0.3, 0.4, 0.5, or 0.6. In another embodiment, similarity between a sample or patient profile and a template is represented by a distance between the sample profile and the template. In one embodiment, a distance below a given value indicates a high similarity, whereas a distance equal to or greater than the given value indicates low similarity.

[0082] In a preferred embodiment, templates are developed for sample comparison. The template may be defined as the error-weighted log ratio average of the expression difference for the group of biomarker genes able to differentiate the particular Wnt/β-catenin signaling pathway regulation status. For example, templates are defined for deregulated Wnt/β-catenin signaling pathway samples and for regulated Wnt/β-catenin signaling pathway samples. Next, a classifier parameter is calculated. This parameter may be calculated using either expression level differences between the sample and template, or by calculation of a correlation coefficient. Such a coefficient, Pᵢ, can be calculated using the following equation:

Pᵢ=(\vec{c}ᵢ·\vec{y})/(∥\vec{c}ᵢ∥·∥\vec{y}∥) (5)

where i=1 and 2.

[0083] As an illustration, in one embodiment, a template for a sample classification based upon one phenotypic endpoint, for example, Wnt/β-catenin signaling pathway deregulated status, is defined as \vec{c}₁ (e.g., a profile consisting of correlation values, C₁, associated with, for example, Wnt/β-catenin signaling pathway regulation status) and/or a template for second phenotypic endpoint, i.e., Wnt/β-catenin signaling pathway regulated status, is defined as \vec{c}₂ (e.g., a profile consisting of correlation values, C₂, associated with, for example, Wnt/β-catenin signaling pathway regulation status). Either one or both of the two classifier parameters (P₁ and P₂) can then be used to measure degrees of similarities between a sample's profile and the templates: P₁ measures the similarity between the sample's profile \vec{y} and the first expression template \vec{c}₁, and P₂ measures the similarity between \vec{y} and the second expression template \vec{c}₂.

[0084] Thus, in one embodiment, \vec{y} is classified, for example, as a deregulated Wnt/β-catenin signaling pathway profile if P₁ is greater than a selected correlation threshold or if P₂ is equal to or less than a selected correlation threshold. In another embodiment, \vec{y} is classified, for example, as a regulated Wnt/β-catenin signaling pathway profile if P₁ is less than a selected correlation threshold or if P₂ is above a selected correlation threshold. In still another embodiment, \vec{y} is classified, for example, as a deregulated Wnt/β-catenin signaling pathway profile if P₁ is greater than a first selected correlation threshold and \vec{y} is classified, for example, as a regulated Wnt/β-catenin signaling pathway profile if P₂ is greater than a second selected correlation threshold.

[0085] Thus, in a more specific embodiment, the above method of determining a particular tumor-related status of an individual comprises the steps of (1) hybridizing labeled target polynucleotides from an individual to a microarray containing one of the above marker sets; (2) hybridizing standard or control polynucleotides molecules to the microarray, wherein the standard or control molecules are differentially labeled from the target molecules; and (3) determining the ratio (or difference) of transcript levels between two channels (individual and control), or simply the transcript levels of the individual; and (4) comparing the results from (3) to the predefined templates, wherein said determining is accomplished by any means known in the art (see Section 3.4.6 on Methods for Classification of Expression Profiles), and wherein the difference, or lack thereof, determines the individual's tumor-related status.

[0086] The method can use the complete set of biomarkers listed in Table 3. However, subsets of the 38 biomarkers, or the “up” (Table 4a) or “down” (Table 4b) arms of the biomarkers may also be used.

[0087] In another embodiment, the above method of determining the Wnt/β-catenin pathway regulation status of an individual uses the two “arms” of the 38 biomarkers. The “up” arm comprises the 17 genes whose expression goes up with Wnt/β-catenin pathway activation (see Table 4a), and the “down” arm comprises the 21 genes whose expression goes down with Wnt/β-catenin pathway activation (see Table 4b). When comparing an individual sample with a standard or control, the expression value of gene X in the sample is compared to the expression value of gene X in the standard or control. For each gene in the set of biomarkers, log(10) ratio is created for the expression value in the individual sample relative to the standard or control (differential expression value). A signature “score” may be calculated by determining the mean log(10) ratio of the genes in the “up” and then subtracting the mean log(10) ratio of the genes in the “down” arm. To determine if this signature score is significant, an ANOVA calculation is performed (for example, a two tailed t-test, Wilcoxon rank-sum test, Kolmogorov-Smirnov test, etc.), in which the expression values of the genes in the two opposing arms are compared to one another. For example, if the two tailed t-test is used to determine whether the mean log(10) ratio of the genes in the “up” arm is significantly different than the mean log(10) ratio of the genes in the “down” arm, a p-value of <0.05 indicates that the signature in the individual sample is significantly different from the standard or control. If the signature score for a sample is above a pre-determined threshold, then the sample is considered to have deregulation of the Wnt/β-catenin signaling pathway. The pre-determined threshold may be 0, or may be the mean, median, or a percentile of signature scores of a collection of samples or a pooled sample used as a standard or control. In an alternative embodiment, a subset of at least 3, 5, 10, and 15 of the 17 “up” genes from Table 4a and a subset of at least 3, 5, 10, and 15 of the 21 “down” genes from Table 4b may be used for calculating this signature score. It will be recognized by those skilled in the art that other differential expression values, besides log(10) ratio may be used for calculating a signature score, as long as the value represents an objective measurement of transcript abundance of the biomarker gene. Examples include, but are not limited to: xdev, error-weighted log (ratio), and mean subtracted log(intensity).

[0088] In yet another embodiment, the signature score of a sample is defined as the average expression level (such as mean log(ratio)) of the complete set of 38 biomarkers or a subset of these biomarkers, regardless of “arm.” If the signature score for a sample is above a pre-determined threshold, then the sample is considered to have deregulation of the Wnt/β-catenin signaling pathway. The pre-determined threshold may be 0, or may be the mean, median, or a percentile of signature scores of a collection of samples or a pooled sample used as a standard or control.

[0089] The use of the biomarkers is not limited to distinguishing or classifying particular tumor types, such as colon cancer, as having deregulated or regulated Wnt/β-catenin signaling pathway. The biomarkers may be used to classify cell samples from any cancer type, where aberrant Wnt/β-catenin signaling may be implicated. Aberrant Wnt/β-catenin pathway signaling has been discovered in a wide variety of cancers, including melanoma, hepatocellular carconima, osteosarcoma, and many tumors (uterine, ovarian, lung, gastric, and renal) (Luu et al., 2004, Curr. Cancer Drug Targets 4:653-671; Reya and Clevers, 2005, Nature 434:843-850; Moon et al., 2004, Nat. Rev. Genet. 5:691-701).

[0090] The use of the biomarkers is also not restricted to distinguishing or classifying cell samples as having deregulated or regulated Wnt/β-catenin signaling pathway for cancer-related conditions, and may be applied in a variety of phenotypes or conditions, in which aberrant Wnt/β-catenin signaling plays a role, or the level of Wnt/β-catenin signaling activity is sought. For example, the biomarkers may be useful for classifying cell samples for bone and joint disorders, such as, but not limited to, osteoporosis, rheumatoid arthritis, sclerosteosis, van Buchem syndrome, osteoporosis pseudoglioma syndrome. The Wnt/β-catenin signaling pathway has previously been implicated in bone and joint formation and regeneration (Boyden et al, 2002, N. Engl. J. Med. 346:1513-1521; Gong et al., 2001, Cell 107:513-523; Little et al., 2002, Am. J. Hum. Genet. 70:11-19; Diana et al., 2007, Nat. Med. 13:156-163; Baron and Rawadi, 2007, Endocrin. 148:2635-2643; Kim et al., 2007, J. Bone Mineral Res_{—} 22:1913-1923). Wnt/β-catenin signaling has also been implicated in the development of diabetes (Jin, 2008, Diabetologia, e-publication ahead of print, Aug. 12, 2008); retinal development and disease (Lad et al., 2008, Stem Cells Dev. E-publication ahead of print Aug. 8, 2008); neurodegernative disorders (Caraci et al, 2008, Neurochem. Res., E-publication ahead of print, Apr. 22, 2008).

### 3.4.2 Methods of Predicting Response to Treatment and Assigning Treatment

[0091] The invention provides a set of biomarkers useful for distinguishing samples from those patients who are predicted to respond to treatment with an agent that modulates the Wnt/β-catenin signaling pathway from patients who are not predicted to respond to treatment an agent that modulates the Wnt/β-catenin signaling pathway. Thus, the invention further provides a method for using these biomarkers for determining whether an individual with cancer is a predicted responder to treatment with an agent that modulates the Wnt/β-catenin signaling pathway. In one embodiment, the invention provides for a method of predicting response of a cancer patient to an agent that modulates the Wnt/β-catenin signaling pathway comprising (1) comparing the level of expression of the biomarkers listed in Table 3 in a sample taken from the individual to the level of expression of the same biomarkers in a standard or control, where the standard or control levels represent those found in a sample having a deregulated Wnt/β-catenin signaling; and (2) determining whether the level of the biomarker-related polynucleotides in the sample from the individual is significantly different than that of the control, wherein if no substantial difference is found, the patient is predicted to respond to treatment with an agent that modulates the Wnt/β-catenin signaling pathway, and if a substantial difference is found, the patient is predicted not to respond to treatment with an agent that modulates the Wnt/β-catenin signaling pathway. Persons of skill in the art will readily see that the standard or control levels may be from a sample having a regulated Wnt/β-catenin signaling pathway. In a more specific embodiment, both controls are run. In case the pool is not pure “Wnt/β-catenin regulated” or “Wnt/β-catenin deregulated,” a set of experiments of individuals with known responder status may be hybridized against the pool to define the expression templates for the predicted responder and predicted non-responder group. Each individual with unknown outcome is hybridized against the same pool and the resulting expression profile is compared to the templates to predict its outcome.

[0092] Wnt/β-catenin signaling pathway deregulation status of a tumor may indicate a subject that is responsive to treatment with an agent that modulates the Wnt/β-catenin signaling pathway. Therefore, the invention provides for a method of determining or assigning a course of treatment of a cancer patient, comprising determining whether the level of expression of the 38 biomarkers of Table 3, or a subset thereof, correlates with the level of these biomarkers in a sample representing deregulated Wnt/β-catenin signaling pathway status or regulated Wnt/β-catenin signaling pathway status; and determining or assigning a course of treatment, wherein if the expression correlates with the deregulated Wnt/β-catenin signaling pathway status pattern, the tumor is treated with an agent that modulates the Wnt/β-catenin signaling pathway.

[0093] As with the diagnostic biomarkers, the method can use the complete set of biomarkers listed in Table 3. However, subsets of the 38 biomarkers may also be used. In another embodiment, a subset of at least 5, 10, 15, 20, 25, 30, and 35 biomarkers drawn from the set of 38, can be used to predict the response of a subject to an agent that modulates the Wnt/β-catenin signaling pathway or assign treatment to a subject.

[0094] Classification of a sample as “predicted responder” or “predicted non-responder” is accomplished substantially as for the diagnostic biomarkers described above, wherein a template is generated to which the biomarker expression levels in the sample are compared.

[0095] In another embodiment, the above method of using Wnt/β-catenin pathway regulation status of an individual to predict treatment response or assign treatment uses the two “arms” of the 39 biomarkers. The “up” arm comprises the genes whose expression goes up with Wnt/β-catenin pathway activation (see Table 4a), and the “down” arm comprises the genes whose expression goes down with Wnt/β-catenin pathway activation (see Table 4b). When comparing an individual sample with a standard or control, the expression value of gene X in the sample is compared to the expression value of gene X in the standard or control. For each gene in the set of biomarkers, log(10) ratio is created for the expression value in the individual sample relative to the standard or control. A signature “score” may be calculated by determining the mean log(10) ratio of the genes in the “up” and then subtracting the mean log(10) ratio of the genes in the “down” arm. If the signature score is above a pre-determined threshold, then the sample is considered to have deregulation of the Wnt/β-catenin signaling pathway. The pre-determined threshold may be 0, or may be the mean, median, or a percentile of signature scores of a collection of samples or a pooled sample used as a standard of control. To determine if this signature score is significant, an ANOVA calculation is perfoiiued (for example, a two tailed t-test, Wilcoxon rank-sum test, Kolmogorov-Smirnov test, etc.), in which the expression values of the genes in the two opposing arms are compared to one another. For example, if the two tailed t-test is used to determine whether the mean log(10) ratio of the genes in the “up” arm is significantly different than the mean log(10) ratio of the genes in the “down” arm, a p-value of <0.05 indicates that the signature in the individual sample is significantly different from the standard or control. In an alternative embodiment, a subset of at least 3, 5, 10, and 15 of the 17 “up” genes from Table 4a and a subset of at least 3, 5, 10, and 15 of the 21 “down” genes from Table 4b may be used for calculating this signature score. In yet another embodiment, the signature score of a sample is defined as the average expression level of the complete set of 38 biomarkers or a subset of these biomarkers, regardless of “arm.” It will be recognized by those skilled in the art that other differential expression values, besides log(10) ratio may be used for calculating a signature score, as long as the value represents an objective measurement of transcript abundance of the biomarker gene. Examples include, but are not limited to: xdev, error-weighted log(ratio), and mean subtracted log(intensity).

[0096] In yet another embodiment, the signature score of a sample is defined as the average expression level (such as mean log(ratio)) of the complete set of 38 biomarkers or a subset of these biomarkers, regardless of “arm.” If the signature score for a sample is above a pre-determined threshold, then the sample is considered to have deregulation of the Wnt/β-catenin signaling pathway. The pre-determined threshold may be 0, or may be the mean, median, or a percentile of signature scores of a collection of samples or a pooled sample used as a standard or control.

[0097] The use of the biomarkers is not restricted to predicting response to agents that modulate Wnt/β-catenin signaling pathway for cancer-related conditions, and may be applied in a variety of phenotypes or conditions, clinical or experimental, in which gene expression plays a role. Where a set of biomarkers has been identified that corresponds to two or more phenotypes, the biomarker sets can be used to distinguish these phenotypes. For example, the phenotypes may be the diagnosis and/or prognosis of clinical states or phenotypes associated with cancers and other disease conditions, or other physiological conditions, prediction of response to agents that modulate pathways other than the Wnt/β-catenin signaling pathway, wherein the expression level data is derived from a set of genes correlated with the particular physiological or disease condition.

[0098] The use of the biomarkers is not limited to predicting response to agents that modulate Wnt/β-catenin signaling pathway for a particular cancer type, such as colon cancer. The biomarkers may be used to predict response to agents in any cancer type, where aberrant Wnt/β-catenin signaling may be implicated. Aberrant Wnt/β-catenin pathway signaling has been discovered in a wide variety of cancers, including melanoma, hepatocellular carconima, osteosarcoma, and many tumors (uterine, ovarian, lung, gastric, and renal) (Luu et al., 2004, Curr. Cancer Drug Targets 4:653-671; Reya and Clevers, 2005, Nature 434:843-850; Moon et al., 2004, Nat. Rev. Genet. 5:691-701).

[0099] The use of the biomarkers is also not restricted to predicting response to agents that modulate Wnt/β-catenin signaling pathway for cancer-related conditions, and may be applied in a variety of phenotypes or conditions, in which aberrant Wnt/β-catenin signaling plays a role, or the level of Wnt/β-catenin signaling activity is sought. For example, the biomarkers may be useful for predicting response to agents that modulate the Wnt/β-catenin signaling pathway in subjects with bone or joint disorders, such as, but not limited to, osteoporosis, rheumatoid arthritis, sclerosteosis, van Buchem syndrome, osteoporosis pseudoglioma syndrome. The Wnt/β-catenin signaling pathway has previously been implicated in bone and joint formation and regeneration (Boyden et al, 2002, N. Engl. J. Med. 346:1513-1521; Gong et al., 2001, Cell 107:513-523; Little et al., 2002, Am. J. Hum. Genet. 70:11-19; Diarra et al., 2007, Nat. Med. 13:156-163; Baron and Rawadi, 2007, Endocrin. 148:2635-2643; Kim et al., 2007, J. Bone Mineral Res. 22:1913-1923). Wnt/β-catenin signaling has also been implicated in the development of diabetes (Jin, 2008, Diabetologia, e-publication ahead of print, Aug. 12, 2008); retinal development and disease (Lad et al., 2008, Stem Cells Dev. E-publication ahead of print Aug. 8, 2008); neurodegenerative disorders (Caraci et al, 2008, Neurochem. Res., E-publication ahead of print, Apr. 22, 2008).

### 3.4.3 Method of Determining Whether an Agent Modulates the Wnt/β-catenin Signaling Pathway

[0100] The invention provides a set of biomarkers useful for and methods of using the biomarkers for identifying or evaluating an agent that is predicted to modify or modulate the Wnt/β-catenin signaling pathway in a subject. “Wnt/β-catenin signaling pathway” is initiated by binding of the Writ ligands (including, but not limited to Wnt1, Wnt2, Wnt2B/13, Wnt3, Wnt3A, Wnt4, Wnt5A, Wnt5B, Wnt6, Wnt7A, Wnt8A, Wnt8B, Wnt9A, Wnt9B, Wnt10A, Wnt10B, Wnt11, and Wnt16) to the co-receptor Frizzled/LRP5/6 complex. Frizzled interacts with Dishevelled, a cytoplasmic protein that functions upstream of β-catenin and GSK3β, leading to the inactivation of the destruction complex. Upon destruction complex inactivation, stabilized β-catenin is transported to the nucleus where it regulates the activity of TCF/LEF family transcription factors. β-catenin induces expression of a large number of genes, including genes involved in proliferation (c-Myc and Cyclin D1) and feedback regulation of the pathway (Axin-2 and LEF1). In this application, unless otherwise specified, it will be understood that “Wnt/β-catenin signaling pathway” refers to signaling through canonical Wnt/β-catenin signaling pathway, which controls the intracellular level of the proto-oncoprotein β-catenin.

[0101] Agents affecting the Wnt/β-catenin signaling pathway include small molecule compounds; proteins or peptides (including antibodies); siRNA, shRNA, or microRNA molecules; or any other agents that modulate one or more genes or proteins that function within the Wnt/β-catenin signaling pathway or other signaling pathways that interact with the Wnt/β-catenin signaling pathway, such as the Notch pathway.

[0102] “Wnt/β-catenin pathway agent” refers to an agent which modulates the canonical Wnt/β-catenin pathway signaling. A Wnt/β-catenin pathway inhibitor inhibits the canonical Wnt/β-catenin pathway signaling. Molecular targets of such agents may include β-catenin, TCF4, APC, axin, GSK3β and any of the genes listed in Table 1. Such agents are known in the art and include, but are not limited to: thiazolidinediones (Wang et al., 2008, J. Surg. Res. Jun. 27, 2008 e-publication ahead of print); PKF115-584 (Doghman et al., 2008, J. Clin. Endocrinol. Metab. E-publication ahead of print, doi: 10.1210/jc.2008-0247); bis[2-(acylamino)phenyl]disulfide (Yamakawa et al., 2008, Biol Pharm. Bull. 31:916-920); FH535 (Handeli and Simon, 2008, Mol. Cancer Ther. 7:521-529); suldinac (Han et al., 2008, Fur. J. Pharmacol. 583:26-31); cyclooxygenase-2 inhibitor celecoxib (Tuynman et al., 2008, Cancer Res. 68:1213-1220); reverse-turn mimetic compounds (U.S. Pat. No. 7,232,822); β-catenin inhibitor compound 1 (WO2005021025); fusicoccin analog (WO2007062243); and FZD10 modulators (WO2008061020). The siRNA agents against target genes listed in the Examples that passed the tertiary validation screen are also exemplary Wnt/β-catenin pathway agents (see also Table 5).

[0103] In one embodiment, the method for measuring the effect or determining whether an agent modulates the Wnt/β-catenin signaling pathway comprises: (1) comparing the level of expression of the biomarkers listed in Table 3 in a sample treated with an agent to the level of expression of the same biomarkers in a standard or control, wherein the standard or control levels represent those found in a vehicle-treated sample; and (2) determining whether the level of the biomarker-related polynucleotides in the treated sample is significantly different than that of the vehicle-treated control, wherein if no substantial difference is found, the agent is predicted not to have an modulate the Wnt/β-catenin signaling pathway, and if a substantial difference is found, the agent is predicted to modulate the Wnt/β-catenin signaling pathway. In a more specific embodiment, the invention provides a subset of at least 5, 10, 15, 20, 25, 30, and 35 biomarkers, drawn from the set of 38, that can be used to measure or determine the effect of an agent on the Wnt/β-catenin signaling pathway.

[0104] In another embodiment, the above method of measuring the effect of an agent on the Wnt/β-catenin signaling pathway uses the two “arms” of the 38 biomarkers. The “up” arm comprises the genes whose expression goes up with Wnt/β-catenin pathway activation (see Table 4a), and the “down” arm comprises the genes whose expression goes down with Wnt/β-catenin pathway activation (see Table 4b). When comparing an individual sample with a standard or control, the expression value of gene X in the sample is compared to the expression value of gene X in the standard or control. For each gene in the set of biomarkers, a log(10) ratio is created for the expression value in the individual sample relative to the standard or control. A signature “score” is calculated by determining the mean log(10) ratio of the genes in the “up” arm and the subtracting the mean log(10) ratio of the genes in the “down” arm. If the signature score is above a pre-determined threshold, then the sample is considered to have deregulation of the Wnt/β-catenin signaling pathway (i.e., the agent modulates the Wnt/β-catenin signaling pathway). The pre-determined threshold may be 0, or may be the mean, median, or a percentile of signature scores of a collection of samples or a pooled sample used as a standard or control. To determine if this signature score is significant, an ANOVA calculation is performed (for example, a two tailed t-test, Wilcoxon rank-sum test, Kolmogorov-Smirnov test, etc.), in which the expression values of the genes in the two opposing arms are compared to one another. For example, if the two tailed t-test is used to determine whether the mean log(10) ratio of the genes in the “up” arm is significantly different than the mean log(10) ratio of the genes in the “down” arm, a p-value of <0.05 indicates that the signature in the individual sample is significantly different from the standard or control. Alternatively, a subset of at least 3, 5, 10, and 15 biomarkers, drawn from the “up” arm (see Table 4a) and a subset of at least 3, 5, 10, and 15 biomarkers from the “down” arm (see Table 4b) may be used for calculating this signature score. It will be recognized by those skilled in the art that other differential expression values, besides log(10) ratio may be used for calculating a signature score, as long as the value represents an objective measurement of transcript abundance of the biomarker gene. Examples include, but are not limited to: xdev, error-weighted log (ratio), and mean subtracted log(intensity).

[0105] In yet another embodiment, the signature score of a sample is defined as the average expression level (such as mean log(ratio)) of the complete set of 38 biomarkers or a subset of these biomarkers, regardless of “arm.” If the signature score for a sample is above a pre-determined threshold, then the sample is considered to have deregulation of the Wnt/3-catenin signaling pathway. The pre-determined threshold may be 0, or may be the mean, median, or a percentile of signature scores of a collection of samples or a pooled sample used as a standard or control.

[0106] The use of the biomarkers is not restricted to determining whether an agent modulates Wnt/β-catenin signaling pathway for cancer-related conditions, and may be applied in a variety of phenotypes or conditions, clinical or experimental, in which gene expression plays a role. Where a set of biomarkers has been identified that corresponds to two or more phenotypes, the biomarker sets can be used to distinguish these phenotypes. For example, the phenotypes may be the diagnosis and/or prognosis of clinical states or phenotypes associated with cancers and other disease conditions, or other physiological conditions, prediction of response to agents that modulate pathways other than the Wnt/β-catenin signaling pathway, wherein the expression level data is derived from a set of genes correlated with the particular physiological or disease condition.

[0107] The use of the biomarkers is not limited to determining whether an agent modulates the Wnt/β-catenin signaling pathway for a particular cancer type, such as colon cancer. The biomarkers may be used to determine whether an agent modulates the Wnt/β-catenin for any cancer type, where aberrant Wnt/β-catenin signaling may be implicated. Aberrant Wnt/β-catenin pathway signaling has been discovered in a wide variety of cancers, including melanoma, hepatocellular carconima, osteosarcoma, and many tumors (uterine, ovarian, lung, gastric, and renal) (Luu et al., 2004, Curr. Cancer Drug Targets 4:653-671; Reya and Clevers, 2005, Nature 434:843-850; Moon et al., 2004, Nat. Rev. Genet. 5:691-701).

[0108] The use of the biomarkers is also not restricted determining whether an agent modulates the Wnt/β-catenin signaling pathway for cancer-related conditions, and may be applied for agents for a variety of phenotypes or conditions, in which aberrant Wnt/β-catenin signaling plays a role, or the level of Wnt/β-catenin signaling activity is sought. For example, the biomarkers may be useful for determining whether an agent modulates the Wnt/β-catenin signaling pathway, for treatment of bone or joint disorders, such as, but not limited to, osteoporosis, rheumatoid arthritis, sclerosteosis, van Buchem syndrome, osteoporosis pseudoglioma syndrome. The Wnt/β-catenin signaling pathway has previously been implicated in bone and joint formation and regeneration (Boyden et al, 2002, N. Engl. J. Med. 346:1513-1521; Gong et al., 2001, Cell 107:513-523; Little et al., 2002, Am. J. Hum. Genet. 70:11-19; Diarra et al., 2007, Nat. Med. 13:156-163; Baron and Rawadi, 2007, Endocrin. 148:2635-2643; Kim et al., 2007, J. Bone Mineral Res. 22:1913-1923). Wnt/β-catenin signaling has also been implicated in the development of diabetes (Jin, 2008, Diabetologia, e-publication ahead of print, Aug. 12, 2008); retinal development and disease (Lad et al., 2008, Stem Cells Dev. E-publication ahead of print Aug. 8, 2008); neurodegernative disorders (Caraci et al, 2008, Neurochem. Res., E-publication ahead of print, Apr. 22, 2008).

### 3.4.4 Method of Measuring Pharmacodynamic Effect of an Agent

[0109] The invention provides a set of biomarkers useful for measuring the pharmacodynamic effect of an agent on the Wnt/β-catenin signaling pathway. The biomarkers provided may be used to monitor modulation of the Wnt/β-catenin signaling pathway at various time points following treatment with said agent in a patient or sample. Thus, the invention further provides a method for using these biomarkers as an early evaluation for efficacy of an agent which modulates the Wnt/β-catenin signaling pathway. In one embodiment, the invention provides for a method of measuring pharmacodynamic effect of an agent that modulates the Wnt/β-catenin signaling pathway in patient or sample comprising: (1) comparing the level of expression of the biomarkers listed in Table 3 in a sample treated with an agent to the level of expression of the same biomarkers in a standard or control, wherein the standard or control levels represent those found in a vehicle-treated sample; and (2) determining whether the level of the biomarker-related polynucleotides in the treated sample is significantly different than that of the vehicle-treated control, wherein if no substantial difference is found, the agent is predicted not to have an pharmacodynamic effect on the Wnt/β-catenin signaling pathway, and if a substantial difference is found, the agent is predicted to have an pharmacodynamic effect on the Wnt/β-catenin signaling pathway. In a more specific embodiment, the invention provides a subset of at least 5, 10, 15, 20, 25, 30, and 35 biomarkers, drawn from the set of 38 that can be used to monitor pharmacodynamic activity of an agent on the Wnt/β-catenin signaling pathway.

[0110] In another embodiment, the above method of measuring pharmacodynamic activity of an agent on the Wnt/β-catenin signaling pathway uses the two “arms” of the 38 biomarkers. The “up” arm comprises the genes whose expression goes up with Wnt/β-catenin pathway activation (see Table 4a), and the “down” arm comprises the genes whose expression goes down with Wnt/β-catenin pathway activation (see Table 4b). When comparing an individual sample with a standard or control, the expression value of gene X in the sample is compared to the expression value of gene X in the standard or control. For each gene in the set of biomarkers, a log(10) ratio is created for the expression value in the individual sample relative to the standard or control. A signature “score” is calculated by determining the mean log(10) ratio of the genes in the “up” arm and the subtracting the mean log(10) ratio of the genes in the “down” arm. If the signature score is above a pre-determined threshold, then the sample is considered to have deregulation of the Wnt/β-catenin signaling pathway. The pre-determined threshold may be 0, or may be the mean, median, or a percentile of signature scores of a collection of samples or a pooled sample used as a standard or control. To determine if this signature score is significant, an ANOVA calculation is performed (for example, a two tailed t-test, Wilcoxon rank-sum test, Kolmogorov-Smirnov test, etc.), in which the expression values of the genes in the two opposing arms are compared to one another. For example, if the two tailed t-test is used to determine whether the mean log(10) ratio of the genes in the “up” arm is significantly different than the mean log(10) ratio of the genes in the “down” arm, a p-value of <0.05 indicates that the signature in the individual sample is significantly different from the standard or control. Alternatively, a subset of at least 3, 5, 10, and 15 biomarkers, drawn from the “up” arm (see Table 4a) and a subset of at least 3, 5, 10, and 15 biomarkers from the “down” arm (see Table 4b) may be used for calculating this signature score. It will be recognized by those skilled in the art that other differential expression values, besides log(10) ratio may be used for calculating a signature score, as long as the value represents an objective measurement of transcript abundance of the biomarker gene. Examples include, but are not limited to: xdev, error-weighted log(ratio), and mean subtracted log(intensity).

[0111] In yet another embodiment, the signature score of a sample is defined as the average expression level (such as mean log(ratio)) of the complete set of 38 biomarkers or a subset of these biomarkers, regardless of “arm.” If the signature score for a sample is above a pre-determined threshold, then the sample is considered to have deregulation of the Wnt/β-catenin signaling pathway. The pre-determined threshold may be 0, or may be the mean, median, or a percentile of signature scores of a collection of samples or a pooled sample used as a standard or control.

### 3.4.5 Improving Sensitivity to Expression Level Differences

[0112] In using the biomarkers disclosed herein, and, indeed, using any sets of biomarkers to differentiate an individual or subject having one phenotype from another individual or subject having a second phenotype, one can compare the absolute expression of each of the biomarkers in a sample to a control; for example, the control can be the average level of expression of each of the biomarkers, respectively, in a pool of individuals or subjects. To increase the sensitivity of the comparison, however, the expression level values are preferably transformed in a number of ways.

[0113] For example, the expression level of each of the biomarkers can be normalized by the average expression level of all markers the expression level of which is determined, or by the average expression level of a set of control genes. Thus, in one embodiment, the biomarkers are represented by probes on a microarray, and the expression level of each of the biomarkers is normalized by the mean or median expression level across all of the genes represented on the microarray, including any non-biomarker genes. In a specific embodiment, the normalization is carried out by dividing the median or mean level of expression of all of the genes on the microarray. In another embodiment, the expression levels of the biomarkers is normalized by the mean or median level of expression of a set of control biomarkers. In a specific embodiment, the control biomarkers comprise a set of housekeeping genes. In another specific embodiment, the normalization is accomplished by dividing by the median or mean expression level of the control genes.

[0114] The sensitivity of a biomarker-based assay will also be increased if the expression levels of individual biomarkers are compared to the expression of the same biomarkers in a pool of samples. Preferably, the comparison is to the mean or median expression level of each the biomarker genes in the pool of samples. Such a comparison may be accomplished, for example, by dividing by the mean or median expression level of the pool for each of the biomarkers from the expression level each of the biomarkers in the sample. This has the effect of accentuating the relative differences in expression between biomarkers in the sample and markers in the pool as a whole, making comparisons more sensitive and more likely to produce meaningful results that the use of absolute expression levels alone. The expression level data may be transformed in any convenient way; preferably, the expression level data for all is log transformed before means or medians are taken.

[0115] In performing comparisons to a pool, two approaches may be used. First, the expression levels of the markers in the sample may be compared to the expression level of those markers in the pool, where nucleic acid derived from the sample and nucleic acid derived from the pool are hybridized during the course of a single experiment. Such an approach requires that new pool nucleic acid be generated for each comparison or limited numbers of comparisons, and is therefore limited by the amount of nucleic acid available. Alternatively, and preferably, the expression levels in a pool, whether normalized and/or transformed or not, are stored on a computer, or on computer-readable media, to be used in comparisons to the individual expression level data from the sample (i.e., single-channel data).

[0116] Thus, the current invention provides the following method of classifying a first cell or organism as having one of at least two different phenotypes, where the different phenotypes comprise a first phenotype and a second phenotype. The level of expression of each of a plurality of genes in a first sample from the first cell or organism is compared to the level of expression of each of said genes, respectively, in a pooled sample from a plurality of cells or organisms, the plurality of cells or organisms comprising different cells or organisms exhibiting said at least two different phenotypes, respectively, to produce a first compared value. The first compared value is then compared to a second compared value, wherein said second compared value is the product of a method comprising comparing the level of expression of each of said genes in a sample from a cell or organism characterized as having said first phenotype to the level of expression of each of said genes, respectively, in the pooled sample. The first compared value is then compared to a third compared value, wherein said third compared value is the product of a method comprising comparing the level of expression of each of the genes in a sample from a cell or organism characterized as having the second phenotype to the level of expression of each of the genes, respectively, in the pooled sample. Optionally, the first compared value can be compared to additional compared values, respectively, where each additional compared value is the product of a method comprising comparing the level of expression of each of said genes in a sample from a cell or organism characterized as having a phenotype different from said first and second phenotypes but included among the at least two different phenotypes, to the level of expression of each of said genes, respectively, in said pooled sample. Finally, a determination is made as to which of said second, third, and, if present, one or more additional compared values, said first compared value is most similar, wherein the first cell or organism is determined to have the phenotype of the cell or organism used to produce said compared value most similar to said first compared value.

[0117] In a specific embodiment of this method, the compared values are each ratios of the levels of expression of each of said genes. In another specific embodiment, each of the levels of expression of each of the genes in the pooled sample is normalized prior to any of the comparing steps. In a more specific embodiment, the normalization of the levels of expression is carried out by dividing by the median or mean level of the expression of each of the genes or dividing by the mean or median level of expression of one or more housekeeping genes in the pooled sample from said cell or organism. In another specific embodiment, the normalized levels of expression are subjected to a log transform, and the comparing steps comprise subtracting the log transform from the log of the levels of expression of each of the genes in the sample. In another specific embodiment, the two or more different phenotypes are different regulation status of the Wnt/β-catenin signaling pathway. In still another specific embodiment, the two or more different phenotypes are different predicted responses to treatment with an agent that modulates the Wnt/β-catenin signaling pathway. In yet another specific embodiment, the levels of expression of each of the genes, respectively, in the pooled sample or said levels of expression of each of said genes in a sample from the cell or organism characterized as having the first phenotype, second phenotype, or said phenotype different from said first and second phenotypes, respectively, are stored on a computer or on a computer-readable medium.

[0118] In another specific embodiment, the two phenotypes are deregulated or Wnt/β-catenin signaling pathway status. In another specific embodiment, the two phenotypes are predicted Wnt/β-catenin signaling pathway-agent responder status. In yet another specific embodiment, the two phenotypes are pharmacodynamic effect and no pharmcodynamic effect of an agent on the Wnt/β-catenin signaling pathway.

[0119] In another specific embodiment, the comparison is made between the expression of each of the genes in the sample and the expression of the same genes in a pool representing only one of two or more phenotypes. In the context of Wnt/β-catenin signaling pathway status-correlated genes, for example, one can compare the expression levels of Wnt/β-catenin signaling pathway regulation status-related genes in a sample to the average level of the expression of the same genes in a “deregulated” pool of samples (as opposed to a pool of samples that include samples from patients having regulated and deregulated Wnt/β-catenin signaling pathway status). Thus, in this method, a sample is classified as having a deregulated Wnt/β-catenin signaling pathway status if the level of expression of prognosis-correlated genes exceeds a chosen coefficient of correlation to the average “deregulated Wnt/β-catenin signaling pathway” expression profile (i.e., the level of expression of Wnt/β-catenin signaling pathway status-correlated genes in a pool of samples from patients having a “deregulated Wnt/β-catenin signaling pathway status.” Patients or subjects whose expression levels correlate more poorly with the “deregulated Wnt/β-catenin signaling pathway” expression profile (i.e., whose correlation coefficient fails to exceed the chosen coefficient) are classified as having a regulated Wnt/β-catenin signaling pathway status.

[0120] Of course, single-channel data may also be used without specific comparison to a mathematical sample pool. For example, a sample may be classified as having a first or a second phenotype, wherein the first and second phenotypes are related, by calculating the similarity between the expression of at least 5 markers in the sample, where the markers are correlated with the first or second phenotype, to the expression of the same markers in a first phenotype template and a second phenotype template, by (a) labeling nucleic acids derived from a sample with a fluorophore to obtain a pool of fluorophore-labeled nucleic acids; (b) contacting said fluorophore-labeled nucleic acid with a microarray under conditions such that hybridization can occur, detecting at each of a plurality of discrete loci on the microarray a flourescent emission signal from said fluorophore-labeled nucleic acid that is bound to said microarray under said conditions; and (c) determining the similarity of marker gene expression in the individual sample to the first and second templates, wherein if said expression is more similar to the first template, the sample is classified as having the first phenotype, and if said expression is more similar to the second template, the sample is classified as having the second phenotype.

### 3.4.6 Methods for Classification of Expression Profiles

[0121] In preferred embodiments, the methods of the invention use a classifier for predicting Wnt/β-catenin signaling pathway regulation status of a sample, predicting response to agents that modulate the Wnt/β-catenin signaling pathway, assigning treatment to a subject, and/or measuring pharmacodynamic effect of an agent. The classifier can be based on any appropriate pattern recognition method that receives an input comprising a biomarker profile and provides an output comprising data indicating which patient subset the patient belongs. The classifier can be trained with training data from a training population of subjects. Typically, the training data comprise for each of the subjects in the training population a training marker profile comprising measurements of respective gene products of a plurality of genes in a suitable sample taken from the patient and outcome information, i.e., deregulated or regulated Wnt/β-catenin signaling pathway status.

[0122] In preferred embodiments, the classifier can be based on a classification (pattern recognition) method described below, e.g., profile similarity; artificial neural network); support vector machine (SVM); logic regression, linear or quadratic discriminant analysis, decision trees, clustering, principal component analysis, nearest neighbor classifier analysis (described infra). Such classifiers can be trained with the training population using methods described in the relevant sections, infra.

[0123] The biomarker profile can be obtained by measuring the plurality of gene products in a cell sample from the subject using a method known in the art, e.g., a method described infra.

[0124] Various known statistical pattern recognition methods can be used in conjunction with the present invention. A classifier based on any of such methods can be constructed using the biomarker profiles and Wnt/β-catenin pathway signalling status data of training patients. Such a classifier can then be used to evaluate the Wnt/β-catenin pathway signalling status of a patient based on the patient's biomarker profile. The methods can also be used to identify biomarkers that discriminate between different Wnt/β-catenin signalling pathway regulation status using a biomarker profile and Wnt/β-catenin signalling pathway regulation data of training patients.

[0125] A. Profile Matching

[0126] A subject can be classified by comparing a biomarker profile obtained in a suitable sample from the subject with a biomarker profile that is representative of a particular phenotypic state. Such a marker profile is also termed a “template profile” or a “template.” The degree of similarity to such a template profile provides an evaluation of the subject's phenotype. If the degree of similarity of the subject marker profile and a template profile is above a predetermined threshold, the subject is assigned the classification represented by the template. For example, a subject's outcome prediction can be evaluated by comparing a biomarker profile of the subject to a predetermined template profile corresponding to a given phenotype or outcome, e.g., a Wnt/β-catenin signalling pathway template comprising measurements of the plurality of biomarkers which are representative of levels of the biomarkers in a plurality of subjects that have tumors with deregulated Wnt/β-catenin signalling pathway status.

[0127] In one embodiment, the similarity is represented by a correlation coefficient between the subject's profile and the template. In one embodiment, a correlation coefficient above a correlation threshold indicates a high similarity, whereas a correlation coefficient below the threshold indicates a low similarity.

[0128] In a specific embodiment, Pᵢ measures the similarity between the subject's profile \vec{y} and a template profile comprising measurements of marker gene products representative of measurements of marker gene products in subjects having a particular outcome or phenotype, e.g., deregulated Wnt/β-catenin signalling pathway status \vec{z}₁ or a regulated Wnt/β-catenin signalling pathway status \vec{z}₂. Such a coefficient, Pᵢ, can be calculated using the following equation:

Pᵢ=(\vec{z}ᵢ·\vec{y})/(∥\vec{z}ᵢ∥·∥\vec{y}∥)

where i designates the ith template. Thus, in one embodiment, \vec{y} is classified as a deregulated Wnt/β-catenin signalling pathway profile if P₁ is greater than a selected correlation threshold. In another embodiment, \vec{y} is classified as a regulated Wnt/β-catenin signalling pathway profile if P₂ is greater than a selected correlation threshold. In preferred embodiments, the correlation threshold is set as 0.3, 0.4, 0.5 or 0.6. In another embodiment, \vec{y} is classified as a deregulated Wnt/β-catenin signalling pathway profile if P₁ is greater than P₂, whereas \vec{y} is classified as a regulated Wnt/β-catenin signalling pathway profile if P₁ is less than P₂.

[0129] In another embodiment, the correlation coefficient is a weighted dot product of the patient's profile \vec{y} and a template profile, in which measurements of each different marker is assigned a weight.

[0130] In another embodiment, similarity between a patient's profile and a template is represented by a distance between the patient's profile and the template. In one embodiment, a distance below a given value indicates high similarity, whereas a distance equal to or greater than the given value indicates low similarity.

[0131] In one embodiment, the Euclidian distance according to the formula

Dᵢ=∥\vec{y}−\vec{z}ᵢ∥

is used, where Dᵢ measures the distance between the subject's profile \vec{y} and a template profile comprising measurements of marker gene products representative of measurements of marker gene products in subjects having a particular Wnt/β-catenin signaling pathway regulation status, e.g., the deregulated Wnt/β-catenin signaling pathway \vec{z}₁ or the regulated Wnt/β-catenin signaling pathway template \vec{z}₂. In other embodiments, the Euclidian distance is squared to place progressively greater weight on cellular constituents that are further apart. In alternative embodiments, the distance measure Dᵢ is the Manhattan distance provide by

$${D}_{i} = {\sum }_{n} \vert y ( n ) - {z}_{i} ( n ) \vert$$

[0132] where y(n) and zᵢ(n) are respectively measurements of the nth marker gene product in the subject's profile \vec{y} and a template profile.

[0133] In another embodiment, the distance is defined as Dᵢ=1−Pᵢ, where Pᵢ is the correlation coefficient or normalized dot product as described above.

[0134] In still other embodiments, the distance measure may be the Chebychev distance, the power distance, and percent disagreement, all of which are well known in the art.

[0135] B. Artificial Neural Network

[0136] In some embodiments, a neural network is used. A neural network can be constructed for a selected set of molecular markers of the invention. A neural network is a two-stage regression or classification model. A neural network has a layered structure that includes a layer of input units (and the bias) connected by a layer of weights to a layer of output units. For regression, the layer of output units typically includes just one output unit. However, neural networks can handle multiple quantitative responses in a seamless fashion.

[0137] In multilayer neural networks, there are input units (input layer), hidden units (hidden layer), and output units (output layer). There is, furthermore, a single bias unit that is connected to each unit other than the input units. Neural networks are described in Duda et al., 2001, Pattern Classification, Second Edition, John Wiley & Sons, Inc., New York; and Hastie et al., 2001, The Elements of Statistical Learning, Springer-Verlag, New York.

[0138] The basic approach to the use of neural networks is to start with an untrained network, present a training pattern, e.g., biomarker profiles from training patients, to the input layer, and to pass signals through the net and determine the output, e.g., the Wnt/β-catenin signaling pathway regulation status in the training patients, at the output layer. These outputs are then compared to the target values; any difference corresponds to an error. This error or criterion function is some scalar function of the weights and is minimized when the network outputs match the desired outputs. Thus, the weights are adjusted to reduce this measure of error. For regression, this error can be sum-of-squared errors. For classification, this error can be either squared error or cross-entropy (deviation). See, e.g., Hastie et al., 2001, The Elements of Statistical Learning, Springer-Verlag, New York.

[0139] Three commonly used training protocols are stochastic, batch, and on-line. In stochastic training, patterns are chosen randomly from the training set and the network weights are updated for each pattern presentation. Multilayer nonlinear networks trained by gradient descent methods such as stochastic back-propagation perform a maximum-likelihood estimation of the weight values in the model defined by the network topology. In batch training, all patterns are presented to the network before learning takes place. Typically, in batch training, several passes are made through the training data. In online training, each pattern is presented once and only once to the net.

[0140] In some embodiments, consideration is given to starting values for weights. If the weights are near zero, then the operative part of the sigmoid commonly used in the hidden layer of a neural network (see, e.g., Hastie et al., 2001, The Elements of Statistical Learning, Springer-Verlag, New York) is roughly linear, and hence the neural network collapses into an approximately linear model. In some embodiments, starting values for weights are chosen to be random values near zero. Hence the model starts out nearly linear, and becomes nonlinear as the weights increase. Individual units localize to directions and introduce nonlinearities where needed. Use of exact zero weights leads to zero derivatives and perfect symmetry, and the algorithm never moves. Alternatively, starting with large weights often leads to poor solutions.

[0141] Since the scaling of inputs determines the effective scaling of weights in the bottom layer, it can have a large effect on the quality of the final solution. Thus, in some embodiments, at the outset all expression values are standardized to have mean zero and a standard deviation of one. This ensures all inputs are treated equally in the regularization process, and allows one to choose a meaningful range for the random starting weights. With standardization inputs, it is typical to take random uniform weights over the range [−0.7, +0.7].

[0142] A recurrent problem in the use of networks having a hidden layer is the optimal number of hidden units to use in the network. The number of inputs and outputs of a network are determined by the problem to be solved. In the present invention, the number of inputs for a given neural network can be the number of molecular markers in the selected set of molecular markers of the invention. The number of output for the neural network will typically be just one. However, in some embodiment more than one output is used so that more than just two states can be defined by the network. If too many hidden units are used in a neural network, the network will have too many degrees of freedom and is trained too long, there is a danger that the network will overfit the data. If there are too few hidden units, the training set cannot be learned. Generally speaking, however, it is better to have too many hidden units than too few. With too few hidden units, the model might not have enough flexibility to capture the nonlinearities in the data; with too many hidden units, the extra weight can be shrunk towards zero if appropriate regularization or pruning, as described below, is used. In typical embodiments, the number of hidden units is somewhere in the range of 5 to 100, with the number increasing with the number of inputs and number of training cases.

[0143] One general approach to determining the number of hidden units to use is to apply a regularization approach. In the regularization approach, a new criterion function is constructed that depends not only on the classical training error, but also on classifier complexity. Specifically, the new criterion function penalizes highly complex models; searching for the minimum in this criterion is to balance error on the training set with error on the training set plus a regularization term, which expresses constraints or desirable properties of solutions:

J=Jₚₐₜ+λJ_{reg}.

The parameter λ is adjusted to impose the regularization more or less strongly. In other words, larger values for λ will tend to shrink weights towards zero: typically cross-validation with a validation set is used to estimate λ. This validation set can be obtained by setting aside a random subset of the training population. Other forms of penalty can also be used, for example the weight elimination penalty (see, e.g., Hastie et al., 2001, The Elements of Statistical Learning, Springer-Verlag, New York).

[0144] Another approach to determine the number of hidden units to use is to eliminate-prune-weights that are least needed. In one approach, the weights with the smallest magnitude are eliminated (set to zero). Such magnitude-based pruning can work, but is nonoptimal; sometimes weights with small magnitudes are important for learning and training data. In some embodiments, rather than using a magnitude-based pruning approach, Wald statistics are computed. The fundamental idea in Wald Statistics is that they can be used to estimate the importance of a hidden unit (weight) in a model. Then, hidden units having the least importance are eliminated (by setting their input and output weights to zero). Two algorithms in this regard are the Optimal Brain Damage (OBD) and the Optimal Brain Surgeon (OBS) algorithms that use second-order approximation to predict how the training error depends upon a weight, and eliminate the weight that leads to the smallest increase in training error.

[0145] Optimal Brain Damage and Optimal Brain Surgeon share the same basic approach of training a network to local minimum error at weight w, and then pruning a weight that leads to the smallest increase in the training error. The predicted functional increase in the error for a change in full weight vector δw is:

$$δ J = {( \frac{\partial J}{\partial w} )}^{t} \cdot δ w + \frac{1}{2} δ {w}^{t} \cdot \frac{{\partial }^{2} J}{\partial {w}^{2}} \cdot δ w + O ( {‖ δ w ‖}^{3} )$$

where

$$\frac{{\partial }^{2} J}{\partial {w}^{2}}$$

is the Hessian matrix. The first term vanishes because we are at a local minimum in error; third and higher order terms are ignored. The general solution for minimizing this function given the constraint of deleting one weight is:

$$δ w = - \frac{{w}_{q}}{{[ {H}^{- 1} ]}_{qq}} {H}^{- 1} \cdot {u}_{q} and {L}_{q} = \frac{1}{2} - \frac{{w}_{q}^{2}}{{[ {H}^{- 1} ]}_{qq}}$$

[0146] Here, u_{q} is the unit vector along the qth direction in weight space and L_{q} is approximation to the saliency of the weight q—the increase in training error if weight q is pruned and the other weights updated δw. These equations require the inverse of H. One method to calculate this inverse matrix is to start with a small value, H₀⁻¹=α⁻¹I, where α is a small parameter—effectively a weight constant. Next the matrix is updated with each pattern according to

$${H}_{m + 1}^{- 1} = {H}_{m}^{- 1} - \frac{{H}_{m}^{- 1} {X}_{m + 1} {X}_{m + 1}^{T} {H}_{m}^{- 1}}{\frac{n}{{a}_{m}} + {X}_{m + 1}^{T} {H}_{m}^{- 1} {X}_{M + 1}}$$

where the subscripts correspond to the pattern being presented and αₘ decreases with m. After the full training set has been presented, the inverse Hessian matrix is given by H⁻¹=Hₙ⁻¹. In algorithmic form, the Optimal Brain Surgeon method is:

begin initialize n_{H}, w, θ

train a reasonably large network to minimum error
do compute H⁻¹ by Eqn. 1

${q}^{*} ← arg {min}_{q} {w}_{q}^{2} / ( {2 [ {H}^{- 1} ]}_{qq} ) ( saliency {L}_{q} )$
$w ← w - \frac{{w}_{{q}^{*}}}{{[ {H}^{- 1} ]}_{{q}^{*} {q}^{*}}} {H}^{- 1} {e}_{{q}^{* }} ( saliency {L}_{q} )$

until J(w) > θ

return w

end

[0147] The Optimal Brain Damage method is computationally simpler because the calculation of the inverse Hessian matrix in line 3 is particularly simple for a diagonal matrix. The above algorithm terminates when the error is greater than a criterion initialized to be θ. Another approach is to change line 6 to terminate when the change in J(w) due to elimination of a weight is greater than some criterion value.

[0148] In some embodiments, a back-propagation neural network (see, for example Abdi, 1994, “A neural network primer”, J. Biol System. 2, 247-283) containing a single hidden layer of ten neurons (ten hidden units) found in EasyNN-Plus version 4.0 g software package (Neural Planner Software Inc.) is used. In a specific example, parameter values within the EasyNN-Plus program are set as follows: a learning rate of 0.05, and a momentum of 0.2. In some embodiments in which the EasyNN-Plus version 4.0 g software package is used, “outlier” samples are identified by performing twenty independently-seeded trials involving 20,000 learning cycles each.

[0149] C. Support Vector Machine

[0150] In some embodiments of the present invention, support vector machines (SVMs) are used to classify subjects using expression profiles of marker genes described in the present invention. General description of SVM can be found in, for example, Cristianini and Shawe-Taylor, 2000, An Introduction to Support Vector Machines, Cambridge University Press, Cambridge, Baser et al., 1992, “A training algorithm for optimal margin classifiers, in Proceedings of the 5^{th} Annual ACM Workshop on Computational Learning Theory, ACM Press, Pittsburgh, Pa., pp. 142-152; Vapnik, 1998, Statistical Learning Theory, Wiley, New York; Duda, Pattern Classification, Second Edition, 2001, John Wiley & Sons, Inc.; Hastie, 2001, The Elements of Statistical Learning, Springer, N.Y.; and Furey et al, 2000, Bioinformatics 16, 906-914. Applications of SVM in biological applications are described in Jaakkola et al., Proceedings of the 7^{th} International Conference on Intelligent Systems for Molecular Biology, AAAI Press, Menlo Park, Calif. (1999); Brown et al., Proc. Natl. Acad. Sci. 97(1):262-67 (2000); Zien et al., Bioinformatics, 16(9):799-807 (2000); Furey et al., Bioinformatics, 16(10):906-914 (2000)

[0151] In one approach, when a SVM is used, the gene expression data is standardized to have mean zero and unit variance and the members of a training population are randomly divided into a training set and a test set. For example, in one embodiment, two thirds of the members of the training population are placed in the training set and one third of the members of the training population are placed in the test set. The expression values for a selected set of genes of the present invention is used to train the SVM. Then the ability for the trained SVM to correctly classify members in the test set is determined. In some embodiments, this computation is performed several times for a given selected set of molecular markers. In each iteration of the computation, the members of the training population are randomly assigned to the training set and the test set. Then, the quality of the combination of molecular markers is taken as the average of each such iteration of the SVM computation.

[0152] Support vector machines map a given set of binary labeled training data to a high-dimensional feature space and separate the two classes of data with a maximum margin hyperplane. In general, this hyperplane corresponds to a nonlinear decision boundary in the input space. Let XεR₀ [symbol] be the input vectors, yε{−1,+1} be the labels, and φ: R₀→F be the mapping from input space to feature space. Then the SVM learning algorithm finds a hyperplane (w,b) such that the quantity

$$γ = {min}_{i} {γ}_{i} \{ 〈 w , φ ( {X}_{i} ) 〉 - b \}$$

is maximized, where the vector w has the same dimensionality as F, b is a real number, and γ is called the margin. The corresponding decision function is then

f(X)=sign( [symbol] (w,φ(X) [symbol] −b)

[0153] This minimum occurs when

$$w = {\sum }_{i} {α}_{i} {y}_{i} φ ( {X}_{i} )$$

where {αᵢ} are positive real numbers that maximize

$${\sum }_{i} {α}_{i} - {\sum }_{ij} {α}_{i} {α}_{j} {y}_{i} {y}_{j} 〈 φ ( {X}_{i} ) , φ ( {X}_{j} ) 〉$$

$$subject to$$

$${\sum }_{i} {α}_{i} {y}_{i} = 0 , {α}_{i} > 0$$

[0154] The decision function can equivalently be expressed as

$$f ( X ) = sign ( {\sum }_{i} {α}_{i} {y}_{i} 〈 φ ( {X}_{i} , φ ( X ) 〉 - b )$$

[0155] From this equation it can be seen that the αᵢ associated with the training point Xᵢ expresses the strength with which that point is embedded in the final decision function. A remarkable property of this alternative representation is that only a subset of the points will be associated with a non-zero αᵢ. These points are called support vectors and are the points that lie closest to the separating hyperplane. The sparseness of the a vector has several computational and learning theoretic consequences. It is important to note that neither the learning algorithm nor the decision function needs to represent explicitly the image of points in the feature space, φ(Xᵢ), since both use only the dot products between such images, [symbol] φ(Xᵢ),φ(Xⱼ) [symbol] . Hence, if one were given a function K(X,Y)= [symbol] φ(X),φ(X) [symbol] , one could learn and use the maximum margin hyperplane in the feature space without ever explicitly performing the mapping. For each continuous positive definite function K(X,Y) there exists a mapping φ such that K(X,Y)= [symbol] φ(X),φ(X) [symbol] for all X,YεR₀ (Mercer's Theorem). The function K(X,Y) is called the kernel function. The use of a kernel function allows the support vector machine to operate efficiently in a nonlinear high-dimensional feature spaces without being adversely affected by the dimensionality of that space. Indeed, it is possible to work with feature spaces of infinite dimension. Moreover, Mercer's theorem makes it possible to learn in the feature space without even knowing φ and F. The matrix Kᵢⱼ= [symbol] φ(Xᵢ),φ(Xⱼ) [symbol] is called the kernel matrix. Finally, note that the learning algorithm is a quadratic optimization problem that has only a global optimum. The absence of local minima is a significant difference from standard pattern recognition techniques such as neural networks. For moderate sample sizes, the optimization problem can be solved with simple gradient descent techniques. In the presence of noise, the standard maximum margin algorithm described above can be subject to overfitting, and more sophisticated techniques should be used. This problem arises because the maximum margin algorithm always finds a perfectly consistent hypothesis and does not tolerate training error. Sometimes, however, it is necessary to trade some training accuracy for better predictive power. The need for tolerating training error has led to the development the soft-margin and the margin-distribution classifiers. One of these techniques replaces the kernel matrix in the training phase as follows:

K←K+λI

while still using the standard kernel function in the decision phase. By tuning λ, one can control the training error, and it is possible to prove that the risk of misclassifying unseen points can be decreased with a suitable choice of λ.

[0156] If instead of controlling the overall training error one wants to control the trade-off between false positives and false negatives, it is possible to modify K as follows:

K←K+λD

where D is a diagonal matrix whose entries are either d⁺ or d⁻, in locations corresponding to positive and negative examples. It is possible to prove that this technique is equivalent to controlling the size of the αᵢ in a way that depends on the size of the class, introducing a bias for larger αᵢ in the class with smaller d. This in turn corresponds to an asymmetric margin; i.e., the class with smaller d will be kept further away from the decision boundary. In some cases, the extreme imbalance of the two classes, along with the presence of noise, creates a situation in which points from the minority class can be easily mistaken for mislabeled points. Enforcing a strong bias against training errors in the minority class provides protection against such errors and forces the SVM to make the positive examples support vectors. Thus, choosing

$${d}^{+} = \frac{1}{{n}^{+}} and {d}^{-} = \frac{1}{{n}^{-}}$$

provides a heuristic way to automatically adjust the relative importance of the two classes, based on their respective cardinalities. This technique effectively controls the trade-off between sensitivity and specificity.

[0157] In the present invention, a linear kernel can be used. The similarity between two marker profiles X and Y can be the dot product X·Y. In one embodiment, the kernel is

K(X,Y)=X·Y+1

[0158] In another embodiment, a kernel of degree d is used

K(X,Y)=(X·Y+1)^{d}, where d can be either 2, 3, . . .

[0159] In still another embodiment, a Gaussian kernel is used

$$K ( X , Y ) = exp \frac{- {\vert X - Y \vert}^{2}}{2 {σ}^{2}}$$

where σ is the width of the Gaussian.

[0160] D. Logistic Regression

[0161] In some embodiments, the classifier is based on a regression model, preferably a logistic regression model. Such a regression model includes a coefficient for each of the molecular markers in a selected set of molecular biomarkers of the invention. In such embodiments, the coefficients for the regression model are computed using, for example, a maximum likelihood approach. In particular embodiments, molecular biomarker data from two different classification or phenotype groups, e.g., deregulated or regulated Wnt/β-catenin signaling pathway, response or non-response to treatment to an agent that modulates the Wnt/β-catenin signaling pathway, is used and the dependent variable is the phenotypic status of the patient for which molecular marker characteristic data are from.

[0162] Some embodiments of the present invention provide generalizations of the logistic regression model that handle multicategory (polychotomous) responses. Such embodiments can be used to discriminate an organism into one or three or more classification groups, e.g., good, intermediate, and poor therapeutic response to treatment with Wnt/β-catenin signaling pathway agents. Such regression models use multicategory logit models that simultaneously refer to all pairs of categories, and describe the odds of response in one category instead of another. Once the model specifies logits for a certain (J−1) pairs of categories, the rest are redundant. See, for example, Agresti, An Introduction to Categorical Data Analysis, John Wiley & Sons, Inc., 1996, New York, Chapter 8, which is hereby incorporated by reference.

[0163] E. Discriminant Analysis

[0164] Linear discriminant analysis (LDA) attempts to classify a subject into one of two categories based on certain object properties. In other words, LDA tests whether object attributes measured in an experiment predict categorization of the objects. LDA typically requires continuous independent variables and a dichotomous categorical dependent variable. In the present invention, the expression values for the selected set of molecular markers of the invention across a subset of the training population serve as the requisite continuous independent variables. The clinical group classification of each of the members of the training population serves as the dichotomous categorical dependent variable.

[0165] LDA seeks the linear combination of variables that maximizes the ratio of between-group variance and within-group variance by using the grouping information. Implicitly, the linear weights used by LDA depend on how the expression of a molecular biomarker across the training set separates in the two groups (e.g., a group that has deregulated Wnt/β-catenin signaling pathway and a group that have regulated Wnt/β-catenin signaling pathway status) and how this gene expression correlates with the expression of other genes. In some embodiments, LDA is applied to the data matrix of the N members in the training sample by K genes in a combination of genes described in the present invention. Then, the linear discriminant of each member of the training population is plotted. Ideally, those members of the training population representing a first subgroup (e.g. those subjects that have deregulated Wnt/β-catenin signaling pathway status) will cluster into one range of linear discriminant values (e.g., negative) and those member of the training population representing a second subgroup (e.g. those subjects that have regulated Wnt/β-catenin signaling pathway status) will cluster into a second range of linear discriminant values (e.g., positive). The LDA is considered more successful when the separation between the clusters of discriminant values is larger. For more information on linear discriminant analysis, see Duda, Pattern Classification, Second Edition, 2001, John Wiley & Sons, Inc; and Hastie, 2001, The Elements of Statistical Learning, Springer, N.Y.; Venables & Ripley, 1997, Modern Applied Statistics with s-plus, Springer, N.Y.

[0166] Quadratic discriminant analysis (QDA) takes the same input parameters and returns the same results as LDA. QDA uses quadratic equations, rather than linear equations, to produce results. LDA and QDA are interchangeable, and which to use is a matter of preference and/or availability of software to support the analysis. Logistic regression takes the same input parameters and returns the same results as LDA and QDA.

[0167] F. Decision Trees

[0168] In some embodiments of the present invention, decision trees are used to classify subjects using expression data for a selected set of molecular biomarkers of the invention. Decision tree algorithms belong to the class of supervised learning algorithms. The aim of a decision tree is to induce a classifier (a tree) from real-world example data. This tree can be used to classify unseen examples which have not been used to derive the decision tree.

[0169] A decision tree is derived from training data. An example contains values for the different attributes and what class the example belongs. In one embodiment, the training data is expression data for a combination of genes described in the present invention across the training population.

[0170] The following algorithm describes a decision tree derivation:

```
Tree (Examples, Class, Attributes)
    Create a root node
    If all Examples have the same Class value, give the root this label
    Else if Attributes is empty label the root according to the most common value
    Else begin
        Calculate the information gain for each attribute
        Select the attribute A with highest information gain and make this the root attribute
        For each possible value, v, of this attribute
            Add a new branch below the root, corresponding to A = v
            Let Examples(v) be those examples with A = v
            If Examples(v) is empty, make the new branch a leaf node labeled
with the  most common value among Examples
            Else let the new branch be the tree created by
                Tree(Examples(v),Class,Attributes - {A})
    end
```

[0171] A more detailed description of the calculation of information gain is shown in the following. If the possible classes vᵢ of the examples have probabilities P(vᵢ) then the information content I of the actual answer is given by:

$$I ( P ( {v}_{1} ) , … , P ( {v}_{n} ) ) = {\sum }_{i = 1}^{n} - P ( {v}_{i} ) {log}_{2} P ( {v}_{i} )$$

The I-value shows how much information we need in order to be able to describe the outcome of a classification for the specific dataset used. Supposing that the dataset contains p positive and n negative (examples (e.g. individuals), the information contained in a correct answer is:

$$I ( \frac{p}{p + n} , \frac{n}{p + n} ) = - \frac{p}{p + n} {log}_{2} \frac{p}{p + n} - \frac{n}{p + n} {log}_{2} \frac{n}{p + n}$$

where log₂ is the logarithm using base two. By testing single attributes the amount of information needed to make a correct classification can be reduced. The remainder for a specific attribute A (e.g. a gene biomarker) shows how much the information that is needed can be reduced.

$$Remainder ( A ) = {\sum }_{i = 1}^{v} \frac{{p}_{i} + {n}_{i}}{p + n} I ( \frac{{p}_{i}}{{p}_{i} + {n}_{i}} , \frac{{n}_{i}}{{p}_{i} + {n}_{i}} )$$

“v” is the number of unique attribute values for attribute A in a certain dataset, “i” is a certain attribute value, “pᵢ” is the number of examples for attribute A where the classification is positive, “nᵢ” is the number of examples for attribute A where the classification is negative.

[0172] The information gain of a specific attribute A is calculated as the difference between the information content for the classes and the remainder of attribute A:

$$Gain ( A ) = I ( \frac{p}{p + n} , \frac{n}{p + n} ) - Remainder ( A )$$

The information gain is used to evaluate how important the different attributes are for the classification (how well they split up the examples), and the attribute with the highest information.

[0173] In general there are a number of different decision tree algorithms, many of which are described in Duda, Pattern Classification, Second Edition, 2001, John Wiley & Sons, Inc. Decision tree algorithms often require consideration of feature processing, impurity measure, stopping criterion, and pruning. Specific decision tree algorithms include, cut are not limited to classification and regression trees (CART), multivariate decision trees, ID3, and C4.5.

[0174] In one approach, when an exemplary embodiment of a decision tree is used, the gene expression data for a selected set of molecular markers of the invention across a training population is standardized to have mean zero and unit variance. The members of the training population are randomly divided into a training set and a test set. For example, in one embodiment, two thirds of the members of the training population are placed in the training set and one third of the members of the training population are placed in the test set. The expression values for a select combination of genes described in the present invention is used to construct the decision tree. Then, the ability for the decision tree to correctly classify members in the test set is determined. In some embodiments, this computation is performed several times for a given combination of molecular markers. In each iteration of the computation, the members of the training population are randomly assigned to the training set and the test set. Then, the quality of the combination of molecular markers is taken as the average of each such iteration of the decision tree computation.

[0175] G. Clustering

[0176] In some embodiments, the expression values for a selected set of molecular markers of the invention are used to cluster a training set. For example, consider the case in which ten gene biomarkers described in one of the geneses of the present invention are used. Each member m of the training population will have expression values for each of the ten biomarkers. Such values from a member m in the training population define the vector:

| | | | | | | | | | |
|---|---|---|---|---|---|---|---|---|---|
| X₁ₘ | X₂ₘ | X₃ₘ | X₄ₘ | X₅ₘ | X₆ₘ | X₇ₘ | X₈ₘ | X₉ₘ | X₁₀ₘ |

[0177] where Xᵢₘ is the expression level of the i^{th} gene in organism m. If there are m organisms in the training set, selection of i genes will define m vectors. Note that the methods of the present invention do not require that each the expression value of every single gene used in the vectors be represented in every single vector m. In other words, data from a subject in which one of the i^{th} genes is not found can still be used for clustering. In such instances, the missing expression value is assigned either a “zero” or some other normalized value. In some embodiments, prior to clustering, the gene expression values are normalized to have a mean value of zero and unit variance.

[0178] Those members of the training population that exhibit similar expression patterns across the training group will tend to cluster together. A particular combination of genes of the present invention is considered to be a good classifier in this aspect of the invention when the vectors cluster into the trait groups found in the training population. For instance, if the training population includes patients with good or poor prognosis, a clustering classifier will cluster the population into two groups, with each group uniquely representing either a deregulated Wnt/β-catenin signalling pathway status or a regulated Wnt/β-catenin signalling pathway status.

[0179] Clustering is described on pages 211-256 of Duda and Hart, Pattern Classification and Scene Analysis, 1973, John Wiley & Sons, Inc., New York. As described in Section 6.7 of Duda, the clustering problem is described as one of finding natural groupings in a dataset. To identify natural groupings, two issues are addressed. First, a way to measure similarity (or dissimilarity) between two samples is determined. This metric (similarity measure) is used to ensure that the samples in one cluster are more like one another than they are to samples in other clusters. Second, a mechanism for partitioning the data into clusters using the similarity measure is determined.

[0180] Similarity measures are discussed in Section 6.7 of Duda, where it is stated that one way to begin a clustering investigation is to define a distance function and to compute the matrix of distances between all pairs of samples in a dataset. If distance is a good measure of similarity, then the distance between samples in the same cluster will be significantly less than the distance between samples in different clusters. However, as stated on page 215 of Duda, clustering does not require the use of a distance metric. For example, a nonmetric similarity function s(x, x′) can be used to compare two vectors x and x′. Conventionally, s(x, x′) is a symmetric function whose value is large when x and x′ are somehow “similar”. An example of a nonmetric similarity function s(x, x′) is provided on page 216 of Duda.

[0181] Once a method for measuring “similarity” or “dissimilarity” between points in a dataset has been selected, clustering requires a criterion function that measures the clustering quality of any partition of the data. Partitions of the data set that extremize the criterion function are used to cluster the data. See page 217 of Duda. Criterion functions are discussed in Section 6.8 of Duda.

[0182] More recently, Duda et al., Pattern Classification, 2^{nd} edition, John Wiley & Sons, Inc. New York, has been published. Pages 537-563 describe clustering in detail. More information on clustering techniques can be found in Kaufman and Rousseeuw, 1990, Finding Groups in Data: An Introduction to Cluster Analysis, Wiley, New York, N.Y.; Everitt, 1993, Cluster analysis (3d ed.), Wiley, New York, N.Y.; and Backer, 1995, Computer-Assisted Reasoning in Cluster Analysis, Prentice Hall, Upper Saddle River, N.J. Particular exemplary clustering techniques that can be used in the present invention include, but are not limited to, hierarchical clustering (agglomerative clustering using nearest-neighbor algorithm, farthest-neighbor algorithm, the average linkage algorithm, the centroid algorithm, or the sum-of-squares algorithm), k-means clustering, fuzzy k-means clustering algorithm, and Jarvis-Patrick clustering.

[0183] H. Principal Component Analysis

[0184] Principal component analysis (PCA) has been proposed to analyze gene expression data. Principal component analysis is a classical technique to reduce the dimensionality of a data set by transforming the data to a new set of variable (principal components) that summarize the features of the data. See, for example, Jolliffe, 1986, Principal Component Analysis, Springer, N.Y. Principal components (PCs) are uncorrelate and are ordered such that the k^{th} PC has the kth largest variance among PCs. The k^{th} PC can be interpreted as the direction that maximizes the variation of the projections of the data points such that it is orthogonal to the first k−1 PCs. The first few PCs capture most of the variation in the data set. In contrast, the last few PCs are often assumed to capture only the residual ‘noise’ in the data.

[0185] PCA can also be used to create a classifier in accordance with the present invention. In such an approach, vectors for a selected set of molecular biomarkers of the invention can be constructed in the same manner described for clustering above. In fact, the set of vectors, where each vector represents the expression values for the select genes from a particular member of the training population, can be considered a matrix. In some embodiments, this matrix is represented in a Free-Wilson method of qualitative binary description of monomers (Kubinyi, 1990, 3D QSAR in drug design theory methods and applications, Pergamon Press, Oxford, pp 589-638), and distributed in a maximally compressed space using PCA so that the first principal component (PC) captures the largest amount of variance information possible, the second principal component (PC) captures the second largest amount of all variance information, and so forth until all variance information in the matrix has been accounted for.

[0186] Then, each of the vectors (where each vector represents a member of the training population) is plotted. Many different types of plots are possible. In some embodiments, a one-dimensional plot is made. In this one-dimensional plot, the value for the first principal component from each of the members of the training population is plotted. In this form of plot, the expectation is that members of a first group will cluster in one range of first principal component values and members of a second group will cluster in a second range of first principal component values.

[0187] In one example, the training population comprises two classification groups. The first principal component is computed using the molecular biomarker expression values for the select genes of the present invention across the entire training population data set where the classification outcomes are known. Then, each member of the training set is plotted as a function of the value for the first principal component. In this example, those members of the training population in which the first principal component is positive represent one classification outcome and those members of the training population in which the first principal component is negative represent the other classification outcome.

[0188] In some embodiments, the members of the training population are plotted against more than one principal component. For example, in some embodiments, the members of the training population are plotted on a two-dimensional plot in which the first dimension is the first principal component and the second dimension is the second principal component. In such a two-dimensional plot, the expectation is that members of each subgroup represented in the training population will cluster into discrete groups. For example, a first cluster of members in the two-dimensional plot will represent subjects in the first classification group, a second cluster of members in the two-dimensional plot will represent subjects in the second classification group, and so forth.

[0189] In some embodiments, the members of the training population are plotted against more than two principal components and a determination is made as to whether the members of the training population are clustering into groups that each uniquely represents a subgroup found in the training population. In some embodiments, principal component analysis is performed by using the R mva package (Anderson, 1973, Cluster Analysis for applications, Academic Press, New York 1973; Gordon, Classification, Second Edition, Chapman and Hall, CRC, 1999.). Principal component analysis is further described in Duda, Pattern Classification, Second Edition, 2001, John Wiley & Sons, Inc.

[0190] I. Nearest Neighbor Classifier Analysis

[0191] Nearest neighbor classifiers are memory-based and require no model to be fit. Given a query point x₀, the k training points x₍ᵣ₎, r, . . . , k closest in distance to x₀ are identified and then the point x₀ is classified using the k nearest neighbors. Ties can be broken at random. In some embodiments, Euclidean distance in feature space is used to determine distance as:

d₍ᵢ₎=∥x₍ᵢ₎−xₒ∥.

[0192] Typically, when the nearest neighbor algorithm is used, the expression data used to compute the linear discriminant is standardized to have mean zero and variance 1. In the present invention, the members of the training population are randomly divided into a training set and a test set. For example, in one embodiment, two thirds of the members of the training population are placed in the training set and one third of the members of the training population are placed in the test set. Profiles of a selected set of molecular biomarkers of the invention represents the feature space into which members of the test set are plotted. Next, the ability of the training set to correctly characterize the members of the test set is computed. In some embodiments, nearest neighbor computation is performed several times for a given combination of genes of the present invention. In each iteration of the computation, the members of the training population are randomly assigned to the training set and the test set. Then, the quality of the combination of genes is taken as the average of each such iteration of the nearest neighbor computation.

[0193] The nearest neighbor rule can be refined to deal with issues of unequal class priors, differential misclassification costs, and feature selection. Many of these refinements involve some form of weighted voting for the neighbors. For more information on nearest neighbor analysis, see Duda, Pattern Classification, Second Edition, 2001, John Wiley & Sons, Inc; and Hastie, 2001, The Elements of Statistical Learning, Springer, N.Y.

[0194] J. Evolutionary Methods

[0195] Inspired by the process of biological evolution, evolutionary methods of classifier design employ a stochastic search for an optimal classifier. In broad overview, such methods create several classifiers—a population—from measurements of gene products of the present invention. Each classifier varies somewhat from the other. Next, the classifiers are scored on expression data across the training population. In keeping with the analogy with biological evolution, the resulting (scalar) score is sometimes called the fitness. The classifiers are ranked according to their score and the best classifiers are retained (some portion of the total population of classifiers). Again, in keeping with biological terminology, this is called survival of the fittest. The classifiers are stochastically altered in the next generation—the children or offspring. Some offspring classifiers will have higher scores than their parent in the previous generation, some will have lower scores. The overall process is then repeated for the subsequent generation: The classifiers are scored and the best ones are retained, randomly altered to give yet another generation, and so on. In part, because of the ranking, each generation has, on average, a slightly higher score than the previous one. The process is halted when the single best classifier in a generation has a score that exceeds a desired criterion value. More information on evolutionary methods is found in, for example, Duda, Pattern Classification, Second Edition, 2001, John Wiley & Sons, Inc.

[0196] K. Bagging, Boosting and the Random Subspace Method

[0197] Bagging, boosting and the random subspace method are combining techniques that can be used to improve weak classifiers. These techniques are designed for, and usually applied to, decision trees. In addition, Skurichina and Duin provide evidence to suggest that such techniques can also be useful in linear discriminant analysis.

[0198] In bagging, one samples the training set, generating random independent bootstrap replicates, constructs the classifier on each of these, and aggregates them by a simple majority vote in the final decision rule. See, for example, Breiman, 1996, Machine Learning 24, 123-140; and Efron & Tibshirani, An Introduction to Bootstrap, Chapman & Hall, New York, 1993.

[0199] In boosting, classifiers are constructed on weighted versions of the training set, which are dependent on previous classification results. Initially, all objects have equal weights, and the first classifier is constructed on this data set. Then, weights are changed according to the performance of the classifier. Erroneously classified objects (molecular biomarkers in the data set) get larger weights, and the next classifier is boosted on the reweighted training set. In this way, a sequence of training sets and classifiers is obtained, which is then combined by simple majority voting or by weighted majority voting in the final decision. See, for example, Freund & Schapire, “Experiments with a new boosting algorithm,” Proceedings 13^{th} International Conference on Machine Learning, 1996, 148-156.

[0200] To illustrate boosting, consider the case where there are two phenotypic groups exhibited by the population under study, phenotype 1, and phenotype 2. Given a vector of molecular markers X, a classifier G(X) produces a prediction taking one of the type values in the two value set: {phenotype 1, phenotype 2}. The error rate on the training sample is

$$\overline{err} = \frac{1}{N} {\sum }_{i = 1}^{N} I ( {y}_{i} \neq G ( {x}_{i} ) )$$

[0201] where N is the number of subjects in the training set (the sum total of the subjects that have either phenotype 1 or phenotype 2).

[0202] A weak classifier is one whose error rate is only slightly better than random guessing. In the boosting algorithm, the weak classification algorithm is repeatedly applied to modified versions of the data, thereby producing a sequence of weak classifiers Gₘ(x), m, =1, 2, . . . , M. The predictions from all of the classifiers in this sequence are then combined through a weighted majority vote to produce the final prediction:

$$G ( x ) = sign ( {\sum }_{m = 1}^{M} {α}_{m} {G}_{m} ( x ) )$$

Here α₁, α₂, αₘ are computed by the boosting algorithm and their purpose is to weigh the contribution of each respective Gₘ(x). Their effect is to give higher influence to the more accurate classifiers in the sequence.

[0203] The data modifications at each boosting step consist of applying weights w₁, w₂, . . . , wₙ to each of the training observations (xᵢ, yᵢ), i=1, 2, . . . , N. Initially all the weights are set to wᵢ=1/N, so that the first step simply trains the classifier on the data in the usual manner. For each successive iteration m=2, 3, . . . , M the observation weights are individually modified and the classification algorithm is reapplied to the weighted observations. At stem in, those observations that were misclassified by the classifier Gₘ₋₁(x) induced at the previous step have their weights increased, whereas the weights are decreased for those that were classified correctly. Thus as iterations proceed, observations that are difficult to correctly classify receive ever-increasing influence. Each successive classifier is thereby forced to concentrate on those training observations that are missed by previous ones in the sequence.

[0204] The exemplary boosting algorithm is summarized as follows:

1. Initialize the observation weights wᵢ = 1/N, i = 1, 2, . . ., N.
2. For m = 1 to M:

(a) Fit a classifier Gₘ(x) to the training set using weights wᵢ.
(b) Compute

${err}_{m} = \frac{{\sum }_{i = 1}^{N} {w}_{i} I ( {y}_{i} \neq {G}_{m} ( {x}_{i} ) )}{{\sum }_{i = 1}^{N} {w}_{i}}$

(c) Compute αₘ = log((1 − errₘ)/errₘ).
(d) Set wᵢ ← wᵢ · exp[αₘ · I(yᵢ ≠ Gₘ(xᵢ))], i = 1, 2, . . ., N.

$3. Output G ( x ) = sign ⌊ {\sum }_{m = 1}^{M} {α}_{m} {G}_{m} ( x ) ⌋$

[0205] In the algorithm, the current classifier Gₘ(x) is induced on the weighted observations at line 2a. The resulting weighted error rate is computed at line 2b. Line 2c calculates the weight αₘ given to Gₘ(x) in producing the final classifier G(x) (line 3). The individual weights of each of the observations are updated for the next iteration at line 2d. Observations misclassified by Gₘ(x) have their weights scaled by a factor exp(αₘ), increasing their relative influence for inducing the next classifier Gₘ₊₁(x) in the sequence. In some embodiments, modifications of the Freund and Schapire, 1997, Journal of Computer and System Sciences 55, pp. 119-139, boosting method are used. See, for example, Hasti et al., The Elements of Statistical Learning, 2001, Springer, N.Y., Chapter 10. In some embodiments, boosting or adaptive boosting methods are used.

[0206] In some embodiments, modifications of Freund and Schapire, 1997, Journal of Computer and System Sciences 55, pp. 119-139, are used. For example, in some embodiments, feature pre-selection is performed using a technique such as the nonparametric scoring methods of Park et al., 2002, Pac. Symp. Biocomput. 6, 52-63. Feature pre-selection is a form of dimensionality reduction in which the genes that discriminate between classifications the best are selected for use in the classifier. Then, the LogitBoost procedure introduced by Friedman et al., 2000, Ann Stat 28, 337-407 is used rather than the boosting procedure of Freund and Schapire. In some embodiments, the boosting and other classification methods of Ben-Dor et al., 2000, Journal of Computational Biology 7, 559-583 are used in the present invention. In some embodiments, the boosting and other classification methods of Freund and Schapire, 1997, Journal of Computer and System Sciences 55, 119-139, are used.

[0207] In the random subspace method, classifiers are constructed in random subspaces of the data feature space. These classifiers are usually combined by simple majority voting in the final decision rule. See, for example, Ho, “The Random subspace method for constructing decision forests,” IEEE Trans Pattern Analysis and Machine Intelligence, 1998; 20(8): 832-844.

[0208] L. Other Algorithms

[0209] The pattern classification and statistical techniques described above are merely examples of the types of models that can be used to construct a model for classification. Moreover, combinations of the techniques described above can be used. Some combinations, such as the use of the combination of decision trees and boosting, have been described. However, many other combinations are possible. In addition, in other techniques in the art such as Projection Pursuit and Weighted Voting can be used to construct a classifier.

### 3.5 DETERMINATION OF BIOMARKER GENE EXPRESSION LEVELS

### 3.5.1 Methods

[0210] The expression levels of the biomarker genes in a sample may be determined by any means known in the art. The expression level may be determined by isolating and determining the level (i.e., amount) of nucleic acid transcribed from each biomarker gene. Alternatively, or additionally, the level of specific proteins translated from mRNA transcribed from a biomarker gene may be determined.

[0211] The level of expression of specific biomarker genes can be accomplished by determining the amount of mRNA, or polynucleotides derived therefrom, present in a sample. Any method for determining RNA levels can be used. For example, RNA is isolated from a sample and separated on an agarose gel. The separated RNA is then transferred to a solid support, such as a filter. Nucleic acid probes representing one or more biomarkers are then hybridized to the filter by northern hybridization, and the amount of biomarker-derived RNA is determined. Such determination can be visual, or machine-aided, for example, by use of a densitometer. Another method of determining RNA levels is by use of a dot-blot or a slot-blot. In this method, RNA, or nucleic acid derived therefrom, from a sample is labeled. The RNA or nucleic acid derived therefrom is then hybridized to a filter containing oligonucleotides derived from one or more biomarker genes, wherein the oligonucleotides are placed upon the filter at discrete, easily-identifiable locations. Hybridization, or lack thereof; of the labeled RNA to the filter-bound oligonucleotides is determined visually or by densitometer. Polynucleotides can be labeled using a radiolabel or a fluorescent (i.e., visible) label.

[0212] These examples are not intended to be limiting. Other methods of determining RNA abundance are known in the art, including, but not limited to quantitative PCR methods, such as TAQMAN®, and Nanostring's NCOUNTER™ Digital Gene Expression System (Seattle, Wash.) (See also WO2007076128; WO2007076129).

[0213] The level of expression of particular biomarker genes may also be assessed by determining the level of the specific protein expressed from the biomarker genes. This can be accomplished, for example, by separation of proteins from a sample on a polyacrylamide gel, followed by identification of specific biomarker-derived proteins using antibodies in a western blot. Alternatively, proteins can be separated by two-dimensional gel electrophoresis systems. Two-dimensional gel electrophoresis is well-known in the art and typically involves isoelectric focusing along a first dimension followed by SDS-PAGE electrophoresis along a second dimension. See, e.g., Flames et al, 1990, GEL ELECTROPHORESIS OF PROTEINS: A PRACTICAL APPROACH, IRL Press, New York; Shevchenko et al., Proc. Nat'l Acad. Sci. USA 93:1440-1445 (1996); Sagliocco et al., Yeast 12:1519-1533 (1996); Lander, Science 274:536-539 (1996). The resulting electropherograms can be analyzed by numerous techniques, including mass spectrometric techniques, western blotting and immunoblot analysis using polyclonal and monoclonal antibodies.

[0214] Alternatively, biomarker-derived protein levels can be determined by constructing an antibody microarray in which binding sites comprise immobilized, preferably monoclonal, antibodies specific to a plurality of protein species encoded by the cell genome. Preferably, antibodies are present for a substantial fraction of the biomarker-derived proteins of interest. Methods for making monoclonal antibodies are well known (see, e.g., Harlow and Lane, 1988, ANTIBODIES: A LABORATORY MANUAL, Cold Spring Harbor, N.Y., which is incorporated in its entirety for all purposes). In one embodiment, monoclonal antibodies are raised against synthetic peptide fragments designed based on genomic sequence of the cell. With such an antibody array, proteins from the cell are contacted to the array, and their binding is assayed with assays known in the art. Generally, the expression, and the level of expression, of proteins of diagnostic or prognostic interest can be detected through immunohistochemical staining of tissue slices or sections.

[0215] Finally, expression of biomarker genes in a number of tissue specimens may be characterized using a “tissue array” (Kononen et al., Nat. Med. 4(7):844-7 (1998)). In a tissue array, multiple tissue samples are assessed on the same microarray. The arrays allow in situ detection of RNA and protein levels; consecutive sections allow the analysis of multiple samples simultaneously.

### 3.5.2 Microarrays

[0216] In preferred embodiments, polynucleotide microarrays are used to measure expression so that the expression status of each of the biomarkers above is assessed simultaneously. In a specific embodiment, the invention provides for oligonucleotide or cDNA arrays comprising probes hybridizable to the genes corresponding to each of the biomarker sets described above (i.e., biomarkers to determine the molecular type or subtype of a tumor; biomarkers to classify the Wnt/β-catenin pathway signaling status of a tumor; biomarkers to predict response of a subject to an agent that modulates the Wnt/β-catenin signaling pathway; biomarkers to measure pharmacodynamic effect of a therapeutic agent on the Wnt/β-catenin signaling pathway).

[0217] The microarrays provided by the present invention may comprise probes hybridizable to the genes corresponding to biomarkers able to distinguish the status of one, two, or all three of the clinical conditions noted above. In particular, the invention provides polynucleotide arrays comprising probes to a subset or subsets of at least 5, 10, 20, 30, 40, 50, 100 genetic biomarkers, up to the full set of 38 biomarkers, which distinguish Wnt/β-catenin signaling pathway deregulated and regulated subjects or tumors.

[0218] In yet another specific embodiment, microarrays that are used in the methods disclosed herein optionally comprise biomarkers additional to at least some of the biomarkers listed in Table 5. For example, in a specific embodiment, the microarray is a screening or scanning array as described in Altschuler et al., International Publication WO 02/18646, published Mar. 7, 2002 and Scherer et al., International Publication WO 02/16650, published Feb. 28, 2002. The scanning and screening arrays comprise regularly-spaced, positionally-addressable probes derived from genomic nucleic acid sequence, both expressed and unexpressed. Such arrays may comprise probes corresponding to a subset of, or all of, the biomarkers listed in Table 3, or a subset thereof as described above, and can be used to monitor biomarker expression in the same way as a microarray containing only biomarkers listed in Table 3.

[0219] In yet another specific embodiment, the microarray is a commercially-available cDNA microarray that comprises at least five of the biomarkers listed in Table 5. Preferably, a commercially-available cDNA microarray comprises all of the biomarkers listed in Table 5. However, such a microarray may comprise 5, 10, 15, 25, 50, 100 or more of the biomarkers in any of Table 5, up to the maximum number of biomarkers in a Table 5, and may comprise all of the biomarkers in any one of Table 5 and a subset of another of Table 5, or subsets of each as described above. In a specific embodiment of the microarrays used in the methods disclosed herein, the biomarkers that are all or a portion of Table 5 make up at least 50%, 60%, 70%, 80%, 90%, 95% or 98% of the probes on the microarray.

[0220] General methods pertaining to the construction of microarrays comprising the biomarker sets and/or subsets above are described in the following sections.

### 3.5.2.1 Construction of Microarrays

[0221] Microarrays are prepared by selecting probes which comprise a polynucleotide sequence, and then immobilizing such probes to a solid support or surface. For example, the probes may comprise DNA sequences, RNA sequences, or copolymer sequences of DNA and RNA. The polynucleotide sequences of the probes may also comprise DNA and/or RNA analogues, or combinations thereof. For example, the polynucleotide sequences of the probes may be full or partial fragments of genomic DNA. The polynucleotide sequences of the probes may also be synthesized nucleotide sequences, such as synthetic oligonucleotide sequences. The probe sequences can be synthesized either enzymatically in vivo, enzymatically in vitro (e.g., by PCR), or non-enzymatically in vitro.

[0222] The probe or probes used in the methods of the invention are preferably immobilized to a solid support which may be either porous or non-porous. For example, the probes of the invention may be polynucleotide sequences which are attached to a nitrocellulose or nylon membrane or filter covalently at either the 3′ or the 5′ end of the polynucleotide. Such hybridization probes are well known in the art (see, e.g., Sambrook et al., MOLECULAR CLONING—A LABORATORY MANUAL (2ND ED.), Vols. 1-3, Cold Spring Harbor Laboratory, Cold Spring Harbor, N.Y. (1989). Alternatively, the solid support or surface may be a glass or plastic surface. In a particularly preferred embodiment, hybridization levels are measured to microarrays of probes consisting of a solid phase on the surface of which are immobilized a population of polynucleotides, such as a population of DNA or DNA mimics, or, alternatively, a population of RNA or RNA mimics. The solid phase may be a nonporous or, optionally, a porous material such as a gel.

[0223] In preferred embodiments, a microarray comprises a support or surface with an ordered array of binding (e.g., hybridization) sites or “probes” each representing one of the biomarkers described herein. Preferably the microarrays are addressable arrays, and more preferably positionally addressable arrays. More specifically, each probe of the array is preferably located at a known, predetermined position on the solid support such that the identity (i.e., the sequence) of each probe can be determined from its position in the array (i.e., on the support or surface). In preferred embodiments, each probe is covalently attached to the solid support at a single site.

[0224] Microarrays can be made in a number of ways, of which several are described below. However produced, microarrays share certain characteristics. The arrays are reproducible, allowing multiple copies of a given array to be produced and easily compared with each other. Preferably, microarrays are made from materials that are stable under binding (e.g., nucleic acid hybridization) conditions. The microarrays are preferably small, e.g., between 1 cm² and 25 cm², between 12 cm² and 13 cm², or 3 cm². However, larger arrays are also contemplated and may be preferable, e.g., for use in screening arrays. Preferably, a given binding site or unique set of binding sites in the microarray will specifically bind (e.g., hybridize) to the product of a single gene in a cell (e.g., to a specific mRNA, or to a specific cDNA derived therefrom). However, in general, other related or similar sequences will cross hybridize to a given binding site.

[0225] The microarrays of the present invention include one or more test probes, each of which has a polynucleotide sequence that is complementary to a subsequence of RNA or DNA to be detected. Preferably, the position of each probe on the solid surface is known. Indeed, the microarrays are preferably positionally addressable arrays. Specifically, each probe of the array is preferably located at a known, predetermined position on the solid support such that the identity (i.e., the sequence) of each probe can be determined from its position on the array (i.e., on the support or surface).

[0226] According to the invention, the microarray is an array (i.e., a matrix) in which each position represents one of the biomarkers described herein. For example, each position can contain a DNA or DNA analogue based on genomic DNA to which a particular RNA or cDNA transcribed from that genetic biomarker can specifically hybridize. The DNA or DNA analogue can be, e.g., a synthetic oligomer or a gene fragment. In one embodiment, probes representing each of the biomarkers is present on the array.

### 3.5.2.2 Preparing Probes for Microarrays

[0227] As noted above, the “probe” to which a particular polynucleotide molecule specifically hybridizes according to the invention contains a complementary genomic polynucleotide sequence. The probes of the microarray preferably consist of nucleotide sequences of no more than 1,000 nucleotides. In some embodiments, the probes of the array consist of nucleotide sequences of 10 to 1,000 nucleotides. In a preferred embodiment, the nucleotide sequences of the probes are in the range of 10-200 nucleotides in length and are genomic sequences of a species of organism, such that a plurality of different probes is present, with sequences complementary and thus capable of hybridizing to the genome of such a species of organism, sequentially tiled across all or a portion of such genome. In other specific embodiments, the probes are in the range of 10-30 nucleotides in length, in the range of 10-40 nucleotides in length, in the range of 20-50 nucleotides in length, in the range of 40-80 nucleotides in length, in the range of 50-150 nucleotides in length, in the range of 80-120 nucleotides in length, and most preferably are 60 nucleotides in length.

[0228] The probes may comprise DNA or DNA “mimics” (e.g., derivatives and analogues) corresponding to a portion of an organism's genome. In another embodiment, the probes of the microarray are complementary RNA or RNA mimics. DNA mimics are polymers composed of subunits capable of specific, Watson-Crick-like hybridization with DNA, or of specific hybridization with RNA. The nucleic acids can be modified at the base moiety, at the sugar moiety, or at the phosphate backbone. Exemplary DNA mimics include, e.g., phosphorothioates.

[0229] DNA can be obtained, e.g., by polymerase chain reaction (PCR) amplification of genomic DNA or cloned sequences. PCR primers are preferably chosen based on a known sequence of the genome that will result in amplification of specific fragments of genomic DNA. Computer programs that are well known in the art are useful in the design of primers with the required specificity and optimal amplification properties, such as Oligo version 5.0 (National Biosciences). Typically each probe on the microarray will be between 10 bases and 50,000 bases, usually between 300 bases and 1,000 bases in length. PCR methods are well known in the art, and are described, for example, in Innis et al., eds., PCR PROTOCOLS: A GUIDE TO METHODS AND APPLICATIONS, Academic Press Inc., San Diego, Calif. (1990). It will be apparent to one skilled in the art that controlled robotic systems are useful for isolating and amplifying nucleic acids.

[0230] An alternative, preferred means for generating the polynucleotide probes of the microarray is by synthesis of synthetic polynucleotides or oligonucleotides, e.g., using N-phosphonate or phosphoramidite chemistries (Froehler et al., Nucleic Acid Res. 14:5399-5407 (1986); McBride et al., Tetrahedron Lett. 24:246-248 (1983)). Synthetic sequences are typically between about 10 and about 500 bases in length, more typically between about 20 and about 100 bases, and most preferably between about 40 and about 70 bases in length. In some embodiments, synthetic nucleic acids include non-natural bases, such as, but by no means limited to, inosine. As noted above, nucleic acid analogues may be used as binding sites for hybridization. An example of a suitable nucleic acid analogue is peptide nucleic acid (see, e.g., Egholm et al., Nature 363:566-568 (1993); U.S. Pat. No. 5,539,083). Probes are preferably selected using an algorithm that takes into account binding energies, base composition, sequence complexity, cross-hybridization binding energies, and secondary structure (see Friend et al., International Patent Publication WO 01/05935, published Jan. 25, 2001; Hughes et al., Nat. Biotech. 19:342-7 (2001)).

[0231] A skilled artisan will also appreciate that positive control probes, e.g., probes known to be complementary and hybridizable to sequences in the target polynucleotide molecules, and negative control probes, e.g., probes known to not be complementary and hybridizable to sequences in the target polynucleotide molecules, should be included on the array. In one embodiment, positive controls are synthesized along the perimeter of the array. In another embodiment, positive controls are synthesized in diagonal stripes across the array. In still another embodiment, the reverse complement for each probe is synthesized next to the position of the probe to serve as a negative control. In yet another embodiment, sequences from other species of organism are used as negative controls or as “spike-in” controls.

### 3.5.2.3 Attaching Probes to the Solid Surface

[0232] The probes are attached to a solid support or surface, which may be made, e.g., from glass, plastic (e.g., polypropylene, nylon), polyacrylamide, nitrocellulose, gel, or other porous or nonporous material. A preferred method for attaching the nucleic acids to a surface is by printing on glass plates, as is described generally by Schena et al, Science 270:467-470 (1995). This method is especially useful for preparing microarrays of cDNA (See also, DeRisi et al, Nature Genetics 14:457-460 (1996); Shalon et al., Genome Res. 6:639-645 (1996); and Schena et al., Proc. Natl. Acad. Sci. U.S.A. 93:10539-11286 (1995)).

[0233] A second preferred method for making microarrays is by making high-density oligonucleotide arrays. Techniques are known for producing arrays containing thousands of oligonucleotides complementary to defined sequences, at defined locations on a surface using photolithographic techniques for synthesis in situ (see, Fodor et al., 1991, Science 251:767-773; Pease et al, 1994, Proc. Natl. Acad. Sci. U.S.A. 91:5022-5026; Lockhart et al., 1996, Nature Biotechnology 14:1675; U.S. Pat. Nos. 5,578,832; 5,556,752; and 5,510,270) or other methods for rapid synthesis and deposition of defined oligonucleotides (Blanchard et al., Biosensors & Bioelectronics 11:687-690). When these methods are used, oligonucleotides (e.g., 60-mers) of known sequence are synthesized directly on a surface such as a derivatized glass slide. Usually, the array produced is redundant, with several oligonucleotide molecules per RNA.

[0234] Other methods for making microarrays, e.g., by masking (Maskos and Southern, 1992, Nuc. Acids. Res. 20:1679-1684), may also be used. In principle, and as noted supra, any type of array, for example, dot blots on a nylon hybridization membrane (see Sambrook et al., MOLECULAR CLONING—A LABORATORY MANUAL (2ND ED.), Vols. 1-3, Cold Spring Harbor Laboratory, Cold Spring Harbor, N.Y. (1989)) could be used. However, as will be recognized by those skilled in the art, very small arrays will frequently be preferred because hybridization volumes will be smaller.

[0235] In one embodiment, the arrays of the present invention are prepared by synthesizing polynucleotide probes on a support. In such an embodiment, polynucleotide probes are attached to the support covalently at either the 3′ or the 5′ end of the polynucleotide.

[0236] In a particularly preferred embodiment, microarrays of the invention are manufactured by means of an ink jet printing device for oligonucleotide synthesis, e.g., using the methods and systems described by Blanchard in U.S. Pat. No. 6,028,189; Blanchard et al., 1996, Biosensors and Bioelectronics 11:687-690; Blanchard, 1998, in SYNTHETIC DNA ARRAYS IN GENETIC ENGINEERING, Vol. 20, J. K. Setlow, Ed., Plenum Press, New York at pages 111-123. Specifically, the oligonucleotide probes in such microarrays are preferably synthesized in arrays, e.g., on a glass slide, by serially depositing individual nucleotide bases in “microdroplets” of a high surface tension solvent such as propylene carbonate. The microdroplets have small volumes (e.g., 100 pL or less, more preferably 50 pL or less) and are separated from each other on the microarray (e.g., by hydrophobic domains) to form circular surface tension wells which define the locations of the array elements (i.e., the different probes). Microarrays manufactured by this ink-jet method are typically of high density, preferably having a density of at least about 2,500 different probes per 1 cm². The polynucleotide probes are attached to the support covalently at either the 3′ or the 5′ end of the polynucleotide.

### 3.5.2.4 Target Polynucleotide Molecules

[0237] The polynucleotide molecules which may be analyzed by the present invention (the “target polynucleotide molecules”) may be from any clinically relevant source, but are expressed RNA or a nucleic acid derived therefrom (e.g., cDNA or amplified RNA derived from cDNA that incorporates an RNA polymerase promoter), including naturally occurring nucleic acid molecules, as well as synthetic nucleic acid molecules. In one embodiment, the target polynucleotide molecules comprise RNA, including, but by no means limited to, total cellular RNA, poly(A)+ messenger RNA (mRNA) or fraction thereof, cytoplasmic mRNA, or RNA transcribed from cDNA (i.e., cRNA; see, e.g., Linsley & Schelter, U.S. patent application Ser. No. 09/411,074, filed Oct. 4, 1999, or U.S. Pat. Nos. 5,545,522, 5,891,636, or 5,716,785). Methods for preparing total and poly(A)+ RNA are well known in the art, and are described generally, e.g., in Sambrook et al., MOLECULAR CLONING—A LABORATORY MANUAL (2ND ED.), Vols. 1-3, Cold Spring Harbor Laboratory, Cold Spring Harbor, N.Y. (1989). In one embodiment, RNA is extracted from cells of the various types of interest in this invention using guanidinium thiocyanate lysis followed by CsCl centrifugation (Chirgwin et al., 1979, Biochemistry 18:5294-5299). In another embodiment, total RNA is extracted using a silica gel-based column, commercially available examples of which include RNeasy (Qiagen, Valencia, Calif.) and StrataPrep (Stratagene, La Jolla, Calif.). In an alternative embodiment, which is preferred for S. cerevisiae, RNA is extracted from cells using phenol and chloroform, as described in Ausubel et al., eds., 1989, CURRENT PROTOCOLS IN MOLECULAR BIOLOGY, Vol. III, Green Publishing Associates, Inc., John Wiley & Sons, Inc., New York, at pp. 13.12.1-13.12.5). Poly(A)+ RNA can be selected, e.g., by selection with oligo-dT cellulose or, alternatively, by oligo-dT primed reverse transcription of total cellular RNA. In one embodiment, RNA can be fragmented by methods known in the art, e.g., by incubation with ZnCl₂, to generate fragments of RNA. In another embodiment, the polynucleotide molecules analyzed by the invention comprise cDNA, or PCR products of amplified RNA or cDNA.

[0238] In one embodiment, total RNA, mRNA, or nucleic acids derived therefrom, is isolated from a sample taken from a person afflicted with cancer. Target polynucleotide molecules that are poorly expressed in particular cells may be enriched using normalization techniques (Bonaldo et al., 1996, Genome Res. 6:791-806).

[0239] As described above, the target polynucleotides are detectably labeled at one or more nucleotides. Any method known in the art may be used to detectably label the target polynucleotides. Preferably, this labeling incorporates the label uniformly along the length of the RNA, and more preferably, the labeling is carried out at a high degree of efficiency. One embodiment for this labeling uses oligo-dT primed reverse transcription to incorporate the label; however, conventional methods of this method are biased toward generating 3′ end fragments. Thus, in a preferred embodiment, random primers (e.g., 9-mers) are used in reverse transcription to uniformly incorporate labeled nucleotides over the fill length of the target polynucleotides. Alternatively, random primers may be used in conjunction with PCR methods or T7 promoter-based in vitro transcription methods in order to amplify the target polynucleotides.

[0240] In a preferred embodiment, the detectable label is a luminescent label. For example, fluorescent labels, bio-luminescent labels, chemi-luminescent labels, and colorimetric labels may be used in the present invention. In a highly preferred embodiment, the label is a fluorescent label, such as a fluorescein, a phosphor, a rhodamine, or a polymethine dye derivative. Examples of commercially available fluorescent labels include, for example, fluorescent phosphoramidites such as FluorePrime (Amersham Pharmacia, Piscataway, N.J.), Fluoredite (Millipore, Bedford, Mass.), FAM (ABI, Foster City, Calif.), and Cy3 or Cy5 (Amersham Pharmacia, Piscataway, N.J.). In another embodiment, the detectable label is a radiolabeled nucleotide.

[0241] In a further preferred embodiment, target polynucleotide molecules from a patient sample are labeled differentially from target polynucleotide molecules of a standard. The standard can comprise target polynucleotide molecules from normal individuals (i.e., those not afflicted with cancer). In a highly preferred embodiment, the standard comprises target polynucleotide molecules pooled from samples from normal individuals or tumor samples from individuals having cancer. In another embodiment, the target polynucleotide molecules are derived from the same individual, but are taken at different time points, and thus indicate the efficacy of a treatment by a change in expression of the biomarkers, or lack thereof during and after the course of treatment (i.e., Wnt/β-catenin pathway therapeutic agent), wherein a change in the expression of the biomarkers from a Wnt/β-catenin pathway deregulation pattern to a Wnt/β-eatenin pathway regulation pattern indicates that the treatment is efficacious. In this embodiment, different timepoints are differentially labeled.

### 3.5.2.5 Hybridization to Microarrays

[0242] Nucleic acid hybridization and wash conditions are chosen so that the target polynucleotide molecules specifically bind or specifically hybridize to the complementary polynucleotide sequences of the array, preferably to a specific array site, wherein its complementary DNA is located.

[0243] Arrays containing double-stranded probe DNA situated thereon are preferably subjected to denaturing conditions to render the DNA single-stranded prior to contacting with the target polynucleotide molecules. Arrays containing single-stranded probe DNA (e.g., synthetic oligodeoxyribonucleic acids) may need to be denatured prior to contacting with the target polynucleotide molecules, e.g., to remove hairpins or dimers which form due to self complementary sequences.

[0244] Optimal hybridization conditions will depend on the length (e.g., oligomer versus polynucleotide greater than 200 bases) and type (e.g., RNA, or DNA) of probe and target nucleic acids. One of skill in the art will appreciate that as the oligonucleotides become shorter, it may become necessary to adjust their length to achieve a relatively uniform melting temperature for satisfactory hybridization results. General parameters for specific (i.e., stringent) hybridization conditions for nucleic acids are described in Sambrook et al., MOLECULAR CLONING—A LABORATORY MANUAL (2ND ED.), Vols. 1-3, Cold Spring Harbor Laboratory, Cold Spring Harbor, N.Y. (1989), and in Ausubel et al., CURRENT PROTOCOLS IN MOLECULAR BIOLOGY, vol. 2, Current Protocols Publishing, New York (1994). Typical hybridization conditions for the cDNA microarrays of Schena et al. are hybridization in 5×SSC plus 0.2% SDS at 65° C. for four hours, followed by washes at 25° C. in low stringency wash buffer (1×SSC plus 0.2% SDS), followed by 10 minutes at 25° C. in higher stringency wash buffer (0.1×SSC plus 0.2% SDS) (Schena et al., Proc. Natl. Acad. Sci. U.S.A. 93:10614 (1993)). Useful hybridization conditions are also provided in, e.g., Tijessen, 1993, HYBRIDIZATION WITH NUCLEIC ACID PROBES, Elsevier Science Publishers B. V.; and Kricka, 1992, NONISOTOPIC DNA PROBE TECHNIQUES, Academic Press, San Diego, Calif.

[0245] Particularly preferred hybridization conditions include hybridization at a temperature at or near the mean melting temperature of the probes (e.g., within 5° C., more preferably within 2° C.) in 1 M NaCl, 50 mM MES buffer (pH 6.5), 0.5% sodium sarcosine and 30% formamide.

### 3.5.2.6 Signal Detection and Data Analysis

[0246] When fluorescently labeled probes are used, the fluorescence emissions at each site of a microarray may be, preferably, detected by scanning confocal laser microscopy. In one embodiment, a separate scan, using the appropriate excitation line, is carried out for each of the two fluorophores used. Alternatively, a laser may be used that allows simultaneous specimen illumination at wavelengths specific to the two fluorophores and emissions from the two fluorophores can be analyzed simultaneously (see Shalon et al., 1996, “A DNA microarray system for analyzing complex DNA samples using two-color fluorescent probe hybridization,” Genome Research 6:639-645, which is incorporated by reference in its entirety for all purposes). In a preferred embodiment, the arrays are scanned with a laser fluorescent scanner with a computer controlled X-Y stage and a microscope objective. Sequential excitation of the two fluorophores is achieved with a multi-line, mixed gas laser and the emitted light is split by wavelength and detected with two photomultiplier tubes. Fluorescence laser scanning devices are described in Schena et al., Genome Res. 6:639-645 (1996), and in other references cited herein. Alternatively, the fiber-optic bundle described by Ferguson et al., Nature Biotech. 14:1681-1684 (1996), may be used to monitor mRNA abundance levels at a large number of sites simultaneously.

[0247] Signals are recorded and, in a preferred embodiment, analyzed by computer, e.g., using a 12 or 16 bit analog to digital board. In one embodiment the scanned image is despeckled using a graphics program (e.g., Hijaak Graphics Suite) and then analyzed using an image gridding program that creates a spreadsheet of the average hybridization at each wavelength at each site. If necessary, an experimentally determined correction for “cross talk” (or overlap) between the channels for the two fluors may be made. For any particular hybridization site on the transcript array, a ratio of the emission of the two fluorophores can be calculated. The ratio is independent of the absolute expression level of the cognate gene, but is useful for genes whose expression is significantly modulated in association with the different cancer-related condition.

### 3.6 COMPUTER-FACILITATED ANALYSIS

[0248] The present invention further provides for kits comprising the biomarker sets above. In a preferred embodiment, the kit contains a microarray ready for hybridization to target polynucleotide molecules, plus software for the data analyses described above.

[0249] The analytic methods described in the previous sections can be implemented by use of the following computer systems and according to the following programs and methods. A Computer system comprises internal components linked to external components. The internal components of a typical computer system include a processor element interconnected with a main memory. For example, the computer system can be an Intel 8086-, 80386-, 80486-, Pentium®, or Pentium®-based processor with preferably 32 MB or more of main memory.

[0250] The external components may include mass storage. This mass storage can be one or more hard disks (which are typically packaged together with the processor and memory). Such hard disks are preferably of 1 GB or greater storage capacity. Other external components include a user interface device, which can be a monitor, together with an inputting device, which can be a “mouse”, or other graphic input devices, and/or a keyboard. A printing device can also be attached to the computer.

[0251] Typically, a computer system is also linked to network link, which can be part of an Ethernet link to other local computer systems, remote computer systems, or wide area communication networks, such as the Internet. This network link allows the computer system to share data and processing tasks with other computer systems.

[0252] Loaded into memory during operation of this system are several software components, which are both standard in the art and special to the instant invention. These software components collectively cause the computer system to function according to the methods of this invention. These software components are typically stored on the mass storage device. A software component comprises the operating system, which is responsible for managing computer system and its network interconnections. This operating system can be, for example, of the Microsoft Windows® family, such as Windows 3.1, Windows 95, Windows 98, Windows 2000, or Windows NT. The software component represents common languages and functions conveniently present on this system to assist programs implementing the methods specific to this invention. Many high or low level computer languages can be used to program the analytic methods of this invention. Instructions can be interpreted during run-time or compiled. Preferred languages include C/C++, FORTRAN and JAVA. Most preferably, the methods of this invention are programmed in mathematical software packages that allow symbolic entry of equations and high-level specification of processing, including some or all of the algorithms to be used, thereby freeing a user of the need to procedurally program individual equations or algorithms. Such packages include Mathlab from Mathworks (Natick, Mass.), Mathematica® from Wolfram Research (Champaign, Ill.), or S-Plus®D from Math Soft (Cambridge, Mass.). Specifically, the software component includes the analytic methods of the invention as programmed in a procedural language or symbolic package.

[0253] The software to be included with the kit comprises the data analysis methods of the invention as disclosed herein. In particular, the software may include mathematical routines for biomarker discovery, including the calculation of correlation coefficients between clinical categories (i.e., Wnt/β-catenin signaling pathway regulation status) and biomarker expression. The software may also include mathematical routines for calculating the correlation between sample biomarker expression and control biomarker expression, using array-generated fluorescence data, to determine the clinical classification of a sample.

[0254] In an exemplary implementation, to practice the methods of the present invention, a user first loads experimental data into the computer system. These data can be directly entered by the user from a monitor, keyboard, or from other computer systems linked by a network connection, or on removable storage media such as a CD-ROM, floppy disk (not illustrated), tape drive (not illustrated), ZIP® drive (not illustrated) or through the network. Next the user causes execution of expression profile analysis software which performs the methods of the present invention.

[0255] In another exemplary implementation, a user first loads experimental data and/or databases into the computer system. This data is loaded into the memory from the storage media or from a remote computer, preferably from a dynamic geneset database system, through the network. Next the user causes execution of software that performs the steps of the present invention.

[0256] Alternative computer systems and software for implementing the analytic methods of this invention will be apparent to one of skill in the art and are intended to be comprehended within the accompanying claims. In particular, the accompanying claims are intended to include the alternative program structures for implementing the methods of this invention that will be readily apparent to one of skill in the art.

### EXAMPLES

[0257] Examples are provided below to further illustrate different features and advantages of the present invention. The examples also illustrate useful methodology for practicing the invention. These examples do not limit the claimed invention.

### Materials and Methods:

[0258] Reagents

[0259] DLD1, SW620, and SW480 cells were obtained from ATCC and cultured in DMEM supplemented with 10% fetal bovine serum and 5% penicillin/streptomycin. All siRNA transfections, irrespective of cell type, employed RNAiMAX (Invitrogen, Carlsbad, Calif.).

[0260] High Throughput siRNA Screens

[0261] The genome-wide siRNA screens were performed as previously described, with minor modifications (Bartz et al., 2006, Mol. Cell. Biol. 26:9377-9386). Briefly, cells were reverse-transfected in 1536-well plates, with a final concentration of pooled siRNA at 25 nM. 72 hours post-transfection, firefly luciferase and Renilla luciferase were quantitated. The pilot-scale screens were completed essentially as described above, except that cells were reverse-transfected in 384-well plates and cell viability was controlled by alamarBlue staining.

[0262] Gene Expression Studies

[0263] For determination of the Wnt/β-catenin signature, the cell lines DLD1, SW480, and SW620 (derived from colorectal tumor or metastases) were transfected with the indicated siRNAs, or water (mock), with RNAiMAX (Invitrogen, Carlsbad, Calif.). The cell lines were plated at 1.5E5 cells per well in tissue culture coated 6-well plates in 2 ml of media. The cells were cultured for 24 hours at 37° C. in 5% CO₂. Lipofectamine RNAiMAX was added to OptiMEM media (Gibco) to a final concentration of 31 μl/ml. The mixture was incubated at room temperature for approximately 5 minutes. Next, 475 μl of the OptiMEM/Lipfectamine RNAiMAX mixture was combined with 25 μl of 10 μM siRNA in water and gently mixed. For “mock” transfections, 25 μl of water was substituted for the siRNA. The siRNA and transfection reagent medium were incubated at room temperature for 20 minutes. Next, 400 μl of the mixture was added to the cell line previously plated in 2 ml.

[0264] Following the 72-hour incubation, RNA was extracted from the cells using RNEasy kits (Qiagen, Valencia, Calif.) following manufacturer's protocols, including the on-column DNAse digestion step. Samples were frozen at −80° C. and then submitted for microarray gene expression profiling on the Affymetrix platform.

[0265] For the microfluidic QPCR tertiary screen data, pools of three siRNAs to each “hit” target were transfected into DLD1 cells. RNA was isolated after 72 hours using the RNEasy Mini 96-well plate kit (Qiagen, Valencia, Calif.). This RNA was run in a RT reaction using the ABI Archive Kit (Applied Biosystems, Foster City, Calif.). The resulting cDNA was run in a pre-amp reaction using the ABI Pre-Amp Master Mix (Applied Biosystems, Foster City, Calif.). On-Demand TagMan Assays (Applied Biosystems, Foster City, Calif.) for the Wnt/β-catenin pathway signature transcripts to be assayed were mixed with Biomark Assay Loading Buffer (Fluidigm, San Francisco, Calif.) in preparation for loading. The BioMark 46.46 chip creates all possible combinations of 46 assay wells and 46 sample wells for a total of 2116 QPCR reactions. In this experiment, duplicate assays were loaded so that duplicate C_{T} values for each sample could be obtained. The chip was run in the Biomark System (Fluidigm, San Francisco, Calif.) instrument for 40 cycles. The entire process from transfections to QPCR was run three times.

[0266] Tertiary Screen Data Analysis

[0267] C_{T} values from the three Biomark runs were converted to fold changes using standard calculations, using GUSB (NM_{—}000181, SEQ ID NO:379) as the input control and duplicate mock transfected samples as the negative control. Additionally, GAPDH (NM_{—}002046, SEQ ID NO: 380) and HPRT1 (NM_{—}000194, SEQ ID NO: 381) were run as input controls. Since no siRNA pools tested target these genes, the regulation of these genes by all siRNAs can be used as the negative control sample in a t-test. The six replicate regulations of a given siRNA pool on a given pathway signature gene are used as the positive control sample. In this way, p-values were calculated for each siRNA pool/signature gene combination. The Bonferroni correction was applied. Only gene regulations whose p-value was less than 0.05 were considered significant.

[0268] For a given siRNA pool, the overlap with an Wnt/β-catenin pathway 18-gene signature subset tested in the Biomark qPCR platform was evaluated by counting the number of genes that were both significantly regulated and were regulated in the proper direction. For siRNA pools that negatively regulate BAR, the proper direction was regulating the gene in the same direction as CTNNB1. For a gene that positively regulates BAR, the proper direction was regulating the gene in the opposite direction as CTNNB1. A p-value was calculated from this count using the binomial distribution assuming the odds of a gene being regulated at random by a given siRNA to be 1 out of 20. These p-values were Bonferroni corrected. Only those siRNA pools with a p-value less than 0.01 were considered to significantly overlap with the tested 18-gene Wnt/β-catenin pathway signature set.

[0269] For cDNA microarray expression analyses, p-values were placed on the regulation of a gene using a prioprietary error-model. A p-value less than 0.01 was considered significant. The p-value of a siRNA's signature overlap with the Wnt/β-catenin pathway signature was calculated using the hypergeometric distribution and Bonferroni corrected. A p-value less than 0.01 was considered a significant signature overlap.

### Example 1

### Genome Scale siRNA Screen to Identify Potential Regulators of the Wnt/β-Catenin Pathway

[0270] A genome-wide small interfering RNA (siRNA) screen on the Wnt/β-catenin pathway was performed in human DLD1 colon adenocarcinoma cells (FIG. 1A). These cells harbor inactivating mutations in APC, and consequently display constitutively active Wnt/β-catenin signal transduction (Morin et al., 1997, Science 275:1787-1790). To enable high-throughput quantitation of Wnt/β-catenin signal transduction, DLD1 cells were engineered to co-express a β-catenin-responsive firefly luciferase reporter (BAR) and an EF1α-driven Renilla luciferase reporter for normalization purposes (Major et al., 2007, Science 316:1043-1046). Using these cells, 28,124 siRNA pools targeting 20,042 mRNAs were screened in triplicate (FIG. 5). siRNAs targeting 3% of these mRNAs fulfilled the criteria of a normalized fold change of greater than 3 or less than 0.25 with a t-test p-value less than 0.01. Therefore, with stringent data restriction, this primary screen yielded 740 genes that regulate Wnt/β-catenin pathway signal transduction.

### Example 2

### Secondary Validation Screens

[0271] As the off-target silencing effects inherent to siRNA screens can produce high false-positive discovery rates (Echeverri et al., 2006, Nat. Methods 3:777-779; Jackson et al., 2006, RNA 12:1179-1187), three validation screens were implemented, the first to increase the number of siRNAs tested, the second to eliminate cell-type specific hits, and a rigorous third screen to insure that the hits were indeed regulating endogenous β-catenin target genes. In the first of these validation screens, we individually tested at least three, and on average six, non-overlapping gene-specific siRNAs (FIG. 1B). Of the 740 genes that passed our hit criteria in the primary screen, 268 were confirmed by a minimum of 2-independent siRNAs (data not shown).

[0272] In the second validation screen, the general applicability of our discoveries was broadened by eliminating cell line-specific siRNA hits. Specifically, the secondary screen was repeated by individually testing three to six independent siRNAs in SW480 cells, an APC mutant colorectal adenocarcinoma cell line (Goyette et al., 1992, Mal. Cell. Biol. 12:1387-1395). 119 genes were identified at the intersection of secondary screen datasets for DLD1 cells and SW480 cells (FIG. 1B). Therefore, of the 28,124 siRNAs tested against the Wnt/β-catenin pathway, 119 genes were identified by the secondary screens that by definition validate with multiple siRNAs in multiple cell lines.

### Example 3

### Definition of the Wnt/β-Catenin Pathway Signature

[0273] For the final validation screen, endogenous β-catenin regulated genes were used to monitor Wnt/β-catenin pathway activity (FIG. 1A). The rationale for this added layer of validation is that the primary and secondary screens employed an artificial β-catenin reporter system. Thus, to test whether the candidate mRNAs were legitimate modulators of endogenous β-catenin target genes, a Wnt/β-catenin pathway signature in colon cancer cells had to be defined.

[0274] Using genome-wide cDNA microarray expression analyses, five non-overlapping β-catenin-specific siRNAs in DLD1 cells were profiled (see Table 2). All of the siRNAs targeting β-catenin (CTNNB1, NM_{—}001098209, SEQ ID NO: 83) were shown to down-regulate transcript levels to below 10% remaining. For DLD1, a Wnt/β-catenin pathway signature was created by finding those transcripts which are regulated at least two-fold (either direction) with a p-value less than 0.01 by all five siRNAs used and which are not significantly regulated by the luciferase negative control siRNA. Of the 43,675 transcripts measured, 329 were regulated by all five β-catenin siRNAs (FIG. 6). SW480 and SW620 cells treated with the two β-catenin-specific siRNAs were profiled and compared with the DLD1 cells (see Table 2). These samples were hybridized against luciferase control siRNA rather than the “mock” transfection sample, so the Wnt/β-catenin pathway signature in these two cell lines were created by identifying those transcripts regulated at least two-fold (either direction) with a p-value less than 0.01 by both of the two CTNNB1-targeting siRNAs. 38 genes were identified in common among the sets of experiments that define the colonic Wnt/β-catenin pathway gene signature (FIG. 1C; Table 3).

TABLE 2
siRNAs and cell lines used for identifying
Wnt/β-catenin pathway signature

| | | SEQ | | | |
|---|---|---|---|---|---|
| Target | | ID | | | |
| Gene | Guide Sequence | NO: | DLD | SW480 | SW620 |
| Luci- | UCGAAGUAUUCCGCGUACGTT | 382 | Yes | Yes | Yes |
| ferase | | | | | |
| CTNNB1 | CUAUCUGUCUGCUCUAGUATT | 383 | Yes | Yes | Yes |
| CTNNB1 | GAGGACCUAUACUUACGAATT | 384 | Yes | Yes | Yes |
| CTNNB1 | CUCAGAUGGUGUCUGCUAUTT | 385 | Yes | No | No |
| CTNNB1 | CCACUAAUGUCCAGCGUUUTT | 386 | Yes | No | No |
| CTNNB1 | GAAUGAAGGUGUGGCGACATT | 387 | Yes | No | No |

TABLE 3
Wnt/β-catenin pathway gene signature and microarray
probe sequences.

| | | | Transcript | | Probe |
|---|---|---|---|---|---|
| | Representative | | SEQ ID | | SEQ ID |
| Gene Symbol | Transcript | Arm | NO: | Probe Sequence | NO: |
| None | AK023739 | Up | 388 | ATGGTCATACGATTCTTATGGACCC | 426 |
| None | BC042436 | Down | 389 | AGAAATCCTCTAGTTGGTGCCTCCA | 427 |
| RDHE2 | NM_138969 | Down | 390 | TGAGGCATTTTCCTGCAGAATGGGC | 428 |
| AADACL1 | NM_020792 | Down | 391 | CAGGGTTCCTTCAATTGGCATTTTC | 429 |
| ADRB2 | NM_000024 | Down | 392 | AAGGAAGGGCATCCTTCTGCCTTTT | 430 |
| AMACR | NM_014324 | Up | 393 | GATGTATGCACCTATTGGACACTGT | 431 |
| ASCL2 | NM_005170 | Up | 394 | AAACGGGCTTGGAGCTGGCCCCATA | 432 |
| AXIN2 | NM_004655 | Up | 395 | GGTTCTGGCTATGTCTTTGCACCAG | 433 |
| B3GNT3 | NM_014256 | Down | 396 | TGTCTGCCAGTCAAGCTTCACAGGC | 434 |
| C15orf48 | NM_032413 | Down | 397 | GAGCCTCATCTTTCGCTGTGTATTC | 435 |
| C20orf82 | NM_080826 | Up | 398 | TTATTTGGTCATGAGGCACCTTGCT | 436 |
| CAPG | NM_001747 | Down | 399 | AGGCCGCAGCTCTGTATAAGGTCTC | 437 |
| CAPN2 | NM_001748 | Down | 400 | CACCTCTGTCGCTTGGGTTAAACAA | 438 |
| CHI3L1 | NM_001276 | Up | 401 | GTAAGACTCGGGATTAGTACACACT | 439 |
| CLIC3 | NM_004669 | Down | 402 | CTGCTCTATGACAGCGACGCCAAGA | 440 |
| ELF3 | NM_004433 | Down | 403 | GAGGTCGTGCGCAGGTTTGTTACAT | 441 |
| ETHE1 | NM_014297 | Down | 404 | ACCTTGTACCACTCGGTCCATGAAA | 442 |
| FER1L3 | NM_013451 | Down | 405 | ATCAGGTCGTCAATCTTCAGATCAA | 443 |
| FOXQ1 | NM_033260 | Up | 406 | TTTAGTTTCTTTGCGAAGCCTGCTC | 444 |
| GM2A | NM_000405 | Down | 407 | GCTGTGCAGTGTGATGTGTCCCAAA | 445 |
| GPRC5A | NM_003979 | Down | 408 | TGCTCCTCTAACTCACAGTGGGTTT | 446 |
| IGFL2 | NM_001002915 | Up | 409 | CAGCGCCAGGAAATCATGAGGTTCA | 447 |
| KCNJ8 | NM_004982 | Up | 410 | GATTGACAAGCGCAGTCCCCTGTAT | 448 |
| KIAA1199 | NM_018689 | Up | 411 | ATGTCCTTCTTGTCCACGGTTTTGT | 449 |
| LAMA3 | NM_198129 | Down | 412 | AGGTGCTCCAGCCAATTTGACGACA | 450 |
| MYH7B | NM_020884 | Up | 413 | AGCATGAGCGCCGTGTCAAGGAGCT | 451 |
| NKD1 | NM_033119 | Up | 414 | AGAGACCCTCGAAATCTCCGAGAAG | 452 |
| PI3 | NM_002638 | Down | 415 | GATTGGTATGGCCTTAGCTCTTAGC | 453 |
| PLAC8 | NM_016619 | Down | 416 | GTGACTGTTTCAGCGACTGCGGAGT | 454 |
| PLLP | NM_015993 | Down | 417 | GTCTCTGCCTTGTCTTTAGAGGACT | 455 |
| PRSS22 | NM_022119 | Down | 418 | GAGCGGGATGCTTGTCTGGGCGACT | 456 |
| RUNX2 | NM_001015051 | Up | 419 | TTTAAATGGTTAATCTCCGCAGGTC | 457 |
| SUSD4 | NM_017982 | Up | 420 | AACAAAGCTCTGATCCTTAAAATTG | 458 |
| TDGF1 | NM_003212 | Up | 421 | GTGGACCTTAGAATACAGTTTTGAG | 459 |
| TFF2 | NM_005423 | Down | 422 | ATAACAGGACGAACTGCGGCTTCCC | 460 |
| TNFRSF19 | NM_148957 | Up | 423 | CATTTTACCCTACCTACTCTAGAAA | 461 |
| TSPAN1 | NM_005727 | Down | 424 | GAGGGTTGCTTCAATCAGCTTTTGT | 462 |
| VSNL1 | NM_003385 | Up | 425 | GACACAGAGGGACCCTTGGCTCCTG | 463 |

TABLE 4a
Wnt/β-catenin pathway gene signature - up arm

| Gene Symbol | Representative Transcript | Arm | SEQ ID NO: |
|---|---|---|---|
| None | AK023739 | Up | 388 |
| AMACR | NM_014324 | Up | 393 |
| ASCL2 | NM_005170 | Up | 394 |
| AXIN2 | NM_004655 | Up | 395 |
| C20orf82 | NM_080826 | Up | 398 |
| CHI3L1 | NM_001276 | Up | 401 |
| FOXQ1 | NM_033260 | Up | 406 |
| IGFL2 | NM_001002915 | Up | 409 |
| KCNJ8 | NM_004982 | Up | 410 |
| KIAA1199 | NM_018689 | Up | 411 |
| MYH7B | NM_020884 | Up | 413 |
| NKD1 | NM_033119 | Up | 414 |
| RUNX2 | NM_001015051 | Up | 419 |
| SUSD4 | NM_017982 | Up | 420 |
| TDGF1 | NM_003212 | Up | 421 |
| TNFRSF19 | NM_148957 | Up | 423 |
| VSNL1 | NM_003385 | Up | 425 |

TABLE 4b
Wnt/β-catenin pathway gene signature - down arm

| Gene Symbol | Representative Transcript | Arm | SEQ ID NO: |
|---|---|---|---|
| None | BC042436 | Down | 389 |
| RDHE2 | NM_138969 | Down | 390 |
| AADACL1 | NM_020792 | Down | 391 |
| ADRB2 | NM_000024 | Down | 392 |
| B3GNT3 | NM_014256 | Down | 396 |
| C15orf48 | NM_032413 | Down | 397 |
| CAPG | NM_001747 | Down | 399 |
| CAPN2 | NM_001748 | Down | 400 |
| CLIC3 | NM_004669 | Down | 402 |
| ELF3 | NM_004433 | Down | 403 |
| ETHE1 | NM_014297 | Down | 404 |
| FER1L3 | NM_013451 | Down | 405 |
| GM2A | NM_000405 | Down | 407 |
| GPRC5A | NM_003979 | Down | 408 |
| LAMA3 | NM_198129 | Down | 412 |
| PI3 | NM_002638 | Down | 415 |
| PLAC8 | NM_016619 | Down | 416 |
| PLLP | NM_015993 | Down | 417 |
| PRSS22 | NM_022119 | Down | 418 |
| TFF2 | NM_005423 | Down | 422 |
| TSPAN1 | NM_005727 | Down | 424 |

[0275] To validate this signature set, a time course analysis was conducted. 31 of the 38 signature genes were regulated within 24 hours of β-catenin silencing, suggesting that the majority of the transcripts comprising this gene signature were directly regulated by β-catenin (FIG. 1C). As further validation, we hypothesized that a Wnt/β-catenin gene signature would discriminate normal colon from colon cancer, given that ˜90% of colon cancers have activated Wnt/β-catenin signaling (Segditsas and Tomlinson, 2006, 25:7531-7537; Polakis, 2000, Genes Dev. 14:1837-1851). Unsupervised hierarchical clustering of 69 matched colon tumors and adjacent uninvolved tissues using this gene signature correctly assigned all of the tumors and 66 of the 69 matched normal samples (FIG. 1D). Samples were classified by comparing the expression of biomarkers in the tumor samples to their expression in CTNNB1 knockdown/DLD-1 cells. Since WNT is constitutively activated in DLD-1 cells, and it is suggested to be also constitutively active in as many as 90% of colon tumors, the expression of biomarkers in tumors when compared to normal adjacent tissue should be opposite of their expression in DLD cells following CTNNB1 knockdown. For example, AXIN2 transcript levels are mostly higher in colon tumor samples compared to normal adjacent tissue samples, and AXIN2 transcript levels decrease in DLD-1 cells following CTNNB1 knockdown. Comparative examination of the DLD1 Wnt/β-catenin pathway profile revealed up-regulation of β-catenin target genes in cancer as compared to normal.

### Example 4

### Tertiary Validation Screen

[0276] Using a subset of the Wnt/β-catenin pathway signature as an endogenous readout for signal transduction, we next asked how genes identified in the secondary screen regulate Wnt/β-catenin pathway signaling. A microfluidic real time PCR platform was employed to simultaneously quantitate the expression of 18 β-catenin target genes in 77 different samples, each of which represents a siRNA secondary screen hit (FIG. 2). 29 of the 77 siRNAs tested regulated at least 6 endogenous Wnt/β-catenin target genes (p-value<0.01). Additionally, cDNA genome-wide microarray expression analysis for 10 of the 13 screen hits examined confirmed against an 18-gene subset of the Wnt/β-catenin pathway gene signature (FIG. 2). When this 18-gene subset of the Wnt/β-catenin pathway signature was applied was applied as a third filter for hits passing the first two validation screens, our siRNA screens reduced 740 hits from the primary screen of over 20,000 mRNAs to 38 triply validated regulators of Wnt/β-catenin pathway signal transduction (Table 5).

TABLE 5
38 Triply validated regulators of Wnt/β-catenin pathway

| | | SEQ | | Tertiary Screen | DLD-1-BAR |
|---|---|---|---|---|---|
| | | ID | | Corr Overlap P- | Regulation |
| Gene Symbol | Transcript | NO: | Screen | value | (LOG2(Fold)) |
| CISD1 | NM_018464 | 464 | Genome | 6.60E−12 | −4.13 |
| MKRN1 | NM_013446 | 465 | Genome | 6.60E−12 | −4.50 |
| DFFB | NM_004402 | 466 | Genome | 2.66E−10 | −4.17 |
| FEV | NM_017521 | 467 | Genome | 2.66E−10 | −4.32 |
| NUP153 | NM_005124 | 468 | Genome | 2.66E−10 | 1.73 |
| PRSSL1 | NM_214710 | 469 | Genome | 8.73E−09 | −2.55 |
| POLD4 | NM_021173 | 470 | Genome | 8.73E−09 | −2.23 |
| GNL3L | NM_019067 | 471 | Genome | 8.73E−09 | −3.65 |
| MYLK | NM_053025 | 472 | Genome | 2.30E−07 | −2.68 |
| JRK | NM_003724 | 473 | Genome | 2.30E−07 | −1.27 |
| GPR84 | NM_020370 | 474 | Genome | 2.30E−07 | 2.04 |
| LRBA | NM_006726 | 475 | Genome | 2.30E−07 | 2.42 |
| LAMB1 | NM_002291 | 476 | Genome | 2.30E−07 | 3.07 |
| YSK4 | NM_001018046 | 477 | Genome | 4.90E−06 | −3.63 |
| UTP18 | NM_016001 | 478 | Genome | 4.90E−06 | −1.62 |
| NDUFV1 | NM_007103 | 479 | Genome | 4.90E−06 | −2.40 |
| TTC18 | NM_145170 | 480 | Genome | 4.90E−06 | −1.51 |
| CD276 | NM_001024736 | 481 | Genome | 8.47E−05 | −2.42 |
| ZBTB26 | NM_020924 | 482 | Genome | 8.47E−05 | −3.26 |
| SLC17A4 | NM_005495 | 483 | Genome | 8.47E−05 | −2.76 |
| CLDND2 | NM_152353 | 484 | Genome | 8.47E−05 | −2.70 |
| CSAG1 | NM_001102576 | 485 | Genome | 8.47E−05 | 1.51 |
| LYSMD3 | NM_198273 | 486 | Genome | 1.19E−03 | −3.20 |
| AGGF1 | NM_018046 | 487 | Genome | 1.19E−03 | −1.67 |
| PIM3 | NM_001001852 | 488 | Genome | 1.19E−03 | −2.13 |
| STK11 | NM_000455 | 489 | Genome | 1.19E−03 | −1.73 |
| PPP1R16B | NM_015568 | 490 | Genome | 1.19E−03 | −4.21 |
| C12orf39 | NM_030572 | 491 | Genome | 1.19E−03 | −3.24 |
| FBXL15 | NM_024326 | 492 | Genome | 1.19E−03 | −2.93 |
| AGGF1 | NM_018046 | 487 | Pilot | 2.33E−15 | −2.63 |
| SLC25A39 | NM_016016 | 493 | Pilot | 3.02E−14 | −0.43 |
| AKT1 | NM_001014431 | 494 | Pilot | 4.55E−12 | −1.25 |
| UBE2Z | NM_023079 | 495 | Pilot | 4.98E−12 | −1.57 |
| PROCR | NM_006404 | 496 | Pilot | 1.34E−06 | −2.01 |
| ASPM | NM_018136 | 497 | Pilot | 3.84E−04 | −1.60 |
| PES1 | NM_014303 | 498 | Pilot | 1.76E−03 | −2.09 |
| XPO6 | NM_015171 | 499 | Pilot | 1.10E−02 | −1.56 |
| ACP2 | NM_001610 | 500 | Pilot | 2.16E−02 | −2.64 |
| CDC42 | NM_001039802 | 501 | Pilot | 4.50E−02 | −2.25 |

### Example 5

### Wnt/β-Catenin Signaling Pathway is Deregulated in a Subpopulation of HCC Patients

[0277] The Wnt/β-catenin pathway biomarkers derived from the colon cancer cells lines were assayed in hepatocellular carcinoma (HCC) tumor samples. More than 200 matched HCC tumors and the corresponding adjacent non-tumor tissues were profiled on the Affymetrix oligo arrays. The expression profiling data from each individual sample was ratioed to the mean of all the expression profiles including both the tumor and adjacent non-tumor tissues. Wnt/β-catenin pathway biomarkers derived from the colon cell lines were analyzed in HCC tumors, by 2-dimesional clustering based on the gene expression levels. Multiple genes from the reporter list showed coherent co-regulation patterns. Approximately 30% of the HCC patents have deregulation Wnt/β-catenin pathway signaling (see FIG. 5) and patients with pathway deregulation seem to be associated with high recurrence (boxed in FIG. 5, where there are fewer patients in the “no-recurrence” category).

What is claimed is:

1. A method for classifying an isolated cell sample as having a deregulated or regulated Wnt/β-catenin signaling pathway, comprising
(i) calculating a signature score by a method comprising: a) calculating a differential expression value of a first expression level of each of a first plurality of genes and each of a second plurality of genes in the cell sample relative to a second expression level of each of said first plurality of genes and each of said second plurality of genes in a control cell sample, said first plurality of genes consisting of at least 3 or more of the genes for which biomarkers are listed in Table 4a and said second plurality of genes consisting of at least 3 or more of the genes for which biomarkers are listed in Table 4b; b) calculating the mean differential expression values of the expression levels of said first plurality of genes and said second plurality of genes; and c) subtracting said mean differential expression value of said second plurality of genes from said mean differential expression value of said first plurality of genes to obtain said signature score;
(ii) classifying said cell sample as having a deregulated Wnt/β-catenin signaling pathway a) if said obtained signature score is above a predetermined threshold, and b) if said signature score is statistically significant; and
(iii) displaying; or outputting to a user interface device, a computer readable storage medium, or a local or remote computer system; the classification produced by said classifying step (ii).

2. The method of claim 1, wherein said differential expression value is log(10) ratio.

3. The method of claim 1, wherein said threshold is 0.

4. The method of claim 1, wherein said signature scores is statistically significant if it has a p-value less than 0.05.

5. The method of claim 1, wherein the isolated cell sample is from a human subject.

6. The method of claim 1, wherein said first plurality consists of at least 5 of the genes for which biomarkers are listed in Table 4a and said second plurality consists of at least 5 of the genes for which biomarkers are listed in Table 4b.

7. A method for predicting response of a subject to an agent that modulates the Wnt/β-catenin signaling pathway, said method comprising:
(a) classifying said subject as having a deregulated or regulated Wnt/β-catenin signaling pathway, wherein said classifying comprises:
(i) calculating a signature score by a method comprising: a) calculating a differential expression value of a first expression level of each of a first plurality of genes and each of a second plurality of genes in an isolated cell sample derived from said subject relative to a second expression level of each of said first plurality of genes and each of said second plurality of genes in a control cell sample, said first plurality of genes consisting of at least 3 or more of the genes for which biomarkers are listed in Table 4a and said second plurality of genes consisting of at least 3 or more of the genes for which biomarkers are listed in Table 4b; b) calculating the mean differential expression values of the expression levels of said first plurality of genes and said second plurality of genes; and c) subtracting said mean differential expression value of said second plurality of genes from said mean differential expression value of said first plurality of genes to obtain said signature score;
(ii) classifying said subject as having a deregulated Wntβ-catenin signaling pathway a) if said obtained signature score is above a predetermined threshold, and b) if said signature score is statistically significant; and
(iii) displaying; or outputting to a user interface device, a computer readable storage medium, or a local or remote computer system; the classification produced by said classifying step (ii);
wherein a subject classified as having deregulated Wnt/β-catenin signaling pathway is indicative of a subject that is predicted to respond to the agent.

8. The method of claim 7, wherein said differential expression value is log(10) ratio.

9. The method of claim 7, wherein said threshold is 0.

10. The method of claim 7, wherein said signature scores is statistically significant if it has a p-value less than 0.05.

11. The method of claim 7, wherein the isolated cell sample is from a human subject.

12. The method of claim 7, wherein said first plurality consists of at least 5 of the genes for which biomarkers are listed in Table 4a and said second plurality consists of at least 5 of the genes for which biomarkers are listed in Table 4b.

13. A method of determining whether an agent modulates the Wnt/β-catenin signaling pathway in a subject, comprising:
(a) contacting a subject with an agent;
(b) classifying said subject as having a deregulated or regulated Wnt/β-catenin signaling pathway, wherein said classifying comprises:
(i) calculating a signature score by a method comprising: a) calculating a differential expression value of a first expression level of each of a first plurality of genes and each of a second plurality of genes in an isolated cell sample derived from said subject relative to a second expression level of each of said first plurality of genes and each of said second plurality of genes in a control cell sample not contacted with said agent, said first plurality of genes consisting of at least 3 or more of the genes for which biomarkers are listed in Table 4a and said second plurality of genes consisting of at least 3 or more of the genes for which biomarkers are listed in Table 4b; b) calculating the mean differential expression values of the expression levels of said first plurality of genes and said second plurality of genes; and c) subtracting said mean differential expression value of said second plurality of genes from said mean differential expression value of said first plurality of genes to obtain said signature score;
(ii) classifying said subject as having a regulated Wnt/β-catenin signaling pathway a) if said obtained signature score is below a predetermined threshold, and b) if said signature score is statistically significant; and
(iii) displaying; or outputting to a user interface device, a computer readable storage medium, or a local or remote computer system; the classification produced by said classifying step (ii);
wherein a subject treated with said agent and classified as having regulated Wnt/β-catenin signaling pathway is indicative of an agent that modulates the Wnt/β-catenin signaling pathway.

14. The method of claim 13, wherein said differential expression value is log(10) ratio.

15. The method of claim 13, wherein said threshold is 0.

16. The method of claim 13, wherein said signature scores is statistically significant if it has a p-value less than 0.05.

17. The method of claim 13, wherein the isolated cell sample is from a human subject.

18. The method of claim 13, wherein said first plurality consists of at least 5 of the genes for which biomarkers are listed in Table 4a and said second plurality consists of at least 5 of the genes for which biomarkers are listed in Table 4b.

The application's sequence listing, which the Patent Office published only in electronic form, follows.

SEQUENCE LISTING (501 sequences)

SEQ ID NO: 1 - DNA, 1509 bp, Homo sapiens
ccaccgcagcggacagcgccaagtgaagcctcgcttcccctccgcggcgaccagggcccgagccgagagtagcagttgtagctacccgcccagaaactagacacaatgtgcgacgaagacgagaccaccgccctcgtgtgcgacaatggctccggcctggtgaaagccggcttcgccggggatgacgcccctagggccgtgttcccgtccatcgtgggccgcccccgacaccagggcgtcatggtcggtatgggtcagaaagattcctacgtgggcgacgaggctcagagcaagagaggtatcctgaccctgaagtaccctatcgagcacggcatcatcaccaactgggatgacatggagaagatctggcaccacaccttctacaacgagcttcgcgtggctcccgaggagcaccccaccctgctcaccgaggcccccctcaatcccaaggccaaccgcgagaagatgacccagatcatgtttgagaccttcaacgtgcccgccatgtacgtggccatccaggccgtgctgtccctctacgcctccggcaggaccaccggcatcgtgctggactccggcgacggcgtcacccacaacgtgcccatttatgagggctacgcgctgccgcacgccatcatgcgcctggacctggcgggccgcgatctcaccgactacctgatgaagatcctcactgagcgtggctactccttcgtgaccacagctgagcgcgagatcgtgcgcgacatcaaggagaagctgtgctacgtggccctggacttcgagaacgagatggcgacggccgcctcctcctcctccctggaaaagagctacgagctgccagacgggcaggtcatcaccatcggcaacgagcgcttccgctgcccggagacgctcttccagccctccttcatcggtatggagtcggcgggcattcacgagaccacctacaacagcatcatgaagtgtgacatcgacatcaggaaggacctgtatgccaacaacgtcatgtcggggggcaccacgatgtaccctgggatcgctgaccgcatgcagaaagagatcaccgcgctggcacccagcaccatgaagatcaagatcatcgccccgccggagcgcaaatactcggtgtggatcggcggctccatcctggcctcgctgtccaccttccagcagatgtggatcaccaagcaggagtacgacgaggccggcccttccatcgtccaccgcaaatgcttctagacacactccacctccagcacgcgacttctcaggacgacgaatcttctcaatgggggggcggctgagctccagccaccccgcagtcactttctttgtaacaacttccgttgctgccatcgtaaactgacacagtgtttataacgtgtacatacattaacttattacctcattttgttatttttcgaaacaaagccctgtggaagaaaatggaaaacttgaagaagcattaaagtcattctgttaagctgcgtaaaaaaaaaaaaaaaaaaa

SEQ ID NO: 2 - DNA, 1330 bp, Homo sapiens
gcagcccagccaagcactgtcaggaatcctgtgaagcagctccagctatgtgtgaagaagaggacagcactgccttggtgtgtgacaatggctctgggctctgtaaggccggctttgctggggacgatgctcccagggctgttttcccatccattgtgggacgtcccagacatcagggggtgatggtgggaatgggacaaaaagacagctacgtgggtgacgaagcacagagcaaaagaggaatcctgaccctgaagtacccgatagaacatggcatcatcaccaactgggacgacatggaaaagatctggcaccactctttctacaatgagcttcgtgttgcccctgaagagcatcccaccctgctcacggaggcacccctgaaccccaaggccaaccgggagaaaatgactcaaattatgtttgagactttcaatgtcccagccatgtatgtggctatccaggcggtgctgtctctctatgcctctggacgcacaactggcatcgtgctggactctggagatggtgtcacccacaatgtccccatctatgagggctatgccttgccccatgccatcatgcgtctggatctggctggccgagatctcactgactacctcatgaagatcctgactgagcgtggctattccttcgttactactgctgagcgtgagattgtccgggacatcaaggagaaactgtgttatgtagctctggactttgaaaatgagatggccactgccgcatcctcatcctcccttgagaagagttacgagttgcctgatgggcaagtgatcaccatcggaaatgaacgtttccgctgcccagagaccctgttccagccatccttcatcgggatggagtctgctggcatccatgaaaccacctacaacagcatcatgaagtgtgatattgacatcaggaaggacctctatgctaacaatgtcctatcagggggcaccactatgtaccctggcattgccgaccgaatgcagaaggagatcacggccctagcacccagcaccatgaagatcaagatcattgcccctccggagcgcaaatactctgtctggatcggtggctccatcctggcctctctgtccaccttccagcagatgtggatcagcaaacaggaatacgatgaagccgggccttccattgtccaccgcaaatgcttctaaaacactttcctgctcctctctgtctctagcacacaactgtgaatgtcctgtggaattatgccttcagttcttttccaaatcattcctagccaaagctctgactcgttacctatgtgttttttaataaatctgaaataggctactggtaa

SEQ ID NO: 3 - DNA, 1793 bp, Homo sapiens
cgcgtccgccccgcgagcacagagcctcgcctttgccgatccgccgcccgtccacacccgccgccagctcaccatggatgatgatatcgccgcgctcgtcgtcgacaacggctccggcatgtgcaaggccggcttcgcgggcgacgatgccccccgggccgtcttcccctccatcgtggggcgccccaggcaccagggcgtgatggtgggcatgggtcagaaggattcctatgtgggcgacgaggcccagagcaagagaggcatcctcaccctgaagtaccccatcgagcacggcatcgtcaccaactgggacgacatggagaaaatctggcaccacaccttctacaatgagctgcgtgtggctcccgaggagcaccccgtgctgctgaccgaggcccccctgaaccccaaggccaaccgcgagaagatgacccagatcatgtttgagaccttcaacaccccagccatgtacgttgctatccaggctgtgctatccctgtacgcctctggccgtaccactggcatcgtgatggactccggtgacggggtcacccacactgtgcccatctacgaggggtatgccctcccccatgccatcctgcgtctggacctggctggccgggacctgactgactacctcatgaagatcctcaccgagcgcggctacagcttcaccaccacggccgagcgggaaatcgtgcgtgacattaaggagaagctgtgctacgtcgccctggacttcgagcaagagatggccacggctgcttccagctcctccctggagaagagctacgagctgcctgacggccaggtcatcaccattggcaatgagcggttccgctgccctgaggcactcttccagccttccttcctgggcatggagtcctgtggcatccacgaaactaccttcaactccatcatgaagtgtgacgtggacatccgcaaagacctgtacgccaacacagtgctgtctggcggcaccaccatgtaccctggcattgccgacaggatgcagaaggagatcactgccctggcacccagcacaatgaagatcaagatcattgctcctcctgagcgcaagtactccgtgtggatcggcggctccatcctggcctcgctgtccaccttccagcagatgtggatcagcaagcaggagtatgacgagtccggcccctccatcgtccaccgcaaatgcttctaggcggactatgacttagttgcgttacaccctttcttgacaaaacctaacttgcgcagaaaacaagatgagattggcatggctttatttgttttttttgttttgttttggttttttttttttttttggcttgactcaggatttaaaaactggaacggtgaaggtgacagcagtcggttggagcgagcatcccccaaagttcacaatgtggccgaggactttgattgcacattgttgtttttttaatagtcattccaaatatgagatgcattgttacaggaagtcccttgccatcctaaaagccaccccacttctctctaaggagaatggcccagtcctctcccaagtccacacaggggaggtgatagcattgctttcgtgtaaattatgtaatgcaaaatttttttaatcttcgccttaatacttttttattttgttttattttgaatgatgagccttcgtgcccccccttccccctttttgtcccccaacttgagatgtatgaaggcttttggtctccctgggagtgggtggaggcagccagggcttacctgtacactgacttgagaccagttgaataaaagtgcacacctta

SEQ ID NO: 4 - DNA, 3693 bp, Homo sapiens
tggctgatcctctcccctgcccttggctccatgaatggcctcggcagtcctagcgggtgcgaaggggaccaaataaggcaaggtggcagaccgggccccccacccctgcccccggctgctccaactgaccctgtccatcagcgttctataaagcggccctcctggagccagccacccagagcccgctgccgccggagccgagccgacccgccccgccgacgaaccccctgaagctgtgccaagatgtgtgacgacgaggagaccaccgccctggtgtgcgacaacggctctgggctggtgaaggccggctttgcgggcgatgacgcgccccgcgctgtcttcccgtccatcgtgggccgcccgcggcaccagggagttatggtgggtatgggtcagaaggactcctacgtaggtgatgaagcccagagcaagagaggcatcctgaccctgaagtatcccatcgagcatggtatcatcaccaactgggacgacatggagaagatctggcaccacaccttctacaatgagctccgtgtggctcccgaggagcaccccaccctgctcacagaggccccgctgaaccccaaggccaaccgggagaagatgactcagatcatgtttgagaccttcaatgtccctgccatgtacgtggccatccaggcagtgctatccctgtatgcttctggccgtaccacaggcattgttctggactctggggatggtgtaactcacaatgtccccatctatgagggctacgctttgccccatgccatcatgcgtctggatctggctggtcgggacctcactgactacctcatgaagatcctcactgagcgtggctactcctttgtcaccactgctgaacgtgaaattgtccgtgacattaaagagaagctgtgctatgtcgccctggattttgagaatgagatggccacagctgcctcttcctcctccctggagaagagctatgaactgcctgatggccaagtcatcactattggcaatgagcgcttccgctgtcctgagacactcttccagccctccttcattggtatggaatctgctggcatccatgaaacaacttacaatagcatcatgaagtgtgacattgatatccgcaaggacctgtatgccaacaatgtcttatctggaggcaccactatgtaccctggtattgctgatcgtatgcagaaggaaatcactgctctggctcctagcaccatgaagattaagattattgctccccctgagcgtaaatactctgtctggattgggggctccatcctggcctctctgtccaccttccagcaaatgtggattagcaagcaagagtacgatgaggcaggcccatccattgtccaccgcaaatgcttctaagatgccttctctctccatctaccttccagtcaggatgacggtattatgcttcttggagtcttccaaaccaccttccctcatctttcatcaatcattgtacagtttgtttacacacgtgcaatttgtttgtgcttctaatatttattgctttataaataaaccagaccaggacttgcaacctataaaagcctctcgtttgtttttggggtaggcgtggggtggggcaggtgtttgctttgacaccctgagcattgtcaaagttcagtaccacaaggttcatccagatgaattaatatgacagttagctgggagttataatgctaacttttgatttcatattttgagacagaatcatgaatatatttcatacctgaaaagcagattaaggtttagttccatataagtaagaaatgaaattgaataagatagttctctagaattagttgctgcagatgacactgaagattattttaacatatgttccagttgtttttgtaaccttgcagaaaatacacatatattgataatgagaaagtcaaagattattttaaatgaattggcttaacttttcaattctttgaactcttcaattttcttcctgggggctatgaaagaaacatgaaggttagctgacagttgggccagccacatcccattgcaaataccctctaaacatatcaagaccattgtgtgtgtgcaaaacaaatgtgaggaagcaggagccaaacacttctgcctgatcagtgactaacttgcgagacagaagccttcaatctcttcgtttctttgaaatcttgagatcttgggttgagtgaactgaaggctgcgaggtcctgagggagcaaggggaggcgagagccacagtgtttgctttgctctgtgcagagctctctgcaaagtatggtgggaaggctgctaggggcagcgttgaaaagaattgaatgtgttccatcctcgaggagttcacacacctacacataatcccccagtgcgtgtggcctggaggctttaaggagatgtatgtgggtctgggtcttagagaatggtcaggaattagggaggtgagaagagcagagaggacatctcagcagaaggaagtgtggcagaagccaggatacaagacatggggcaggctggtaggtgctgatgaattttagaaaatccactgggaaaggtagatttcaactagattgcagaagccttacagatttttgttttcaaattaattgccagtgaactgttagcattcacagaagtgtttgaatagacttaattgaattttattgatgaggattcaagacacagagattaagcaactggtgcaatgttataaactttatttgtggaatgtgctagacaggaactcagattttctgacacctactctgatggtgtctctaaaataatctttctaactttatagtttatcaagggtaaccccattctatcacatgccttttgagaatttgggttcaatatttggagtactctggactcatcagacatctttaataaattgtaatacattgccactgtcattcaaggtcctatgtgtgtctttttgcctattcataccaaaaatatcttttgatccctgactctgggtcgggcatagtattaagggcaggggacacaaagatgtatgagagcacattttctgtgaataaaaagctcagagtttagagttctgtatgtagcatattcaaatggaaggccttctatgcaataaaggctaaataatacatcaacttggtggcattttatttagataaggtgcaaacattattgtacatatgccccccgcccccaccaccccattgtatcctatagcacagttgaactggtttaaaagccatgcatggggaggtatgatttcactagtttttgtgtctctttcttttcctctgtacaattgagtgcataaatattatgaattgtatcctctgaacacagtattaatgctttaactgtagatgattggctggggtatcacctctggttctttccatctgtgattagaaatggagaggacatttttatttctatgtaaaagtagaagctttaagaatcagcttctgatatttatatcagaagaggtaagcacccagattcttgttgaattctgaggtcttctcatctttgcttgattatagggtataaagtattagaacaattgaatcttaaaaattgtgcttaaggaaggtactaagacaaaaatgtttgcttaaggtaatcttcatatgtatacaataactgagacatggatagtgcctacgtctttggttaaagtgcaataaacaaagaactatataaatt

SEQ ID NO: 5 - DNA, 1919 bp, Homo sapiens
gtctcagtcgccgctgccagctctcgcactctgttcttccgccgctccgccgtcgcgtttctctgccggtcgcaatggaagaagagatcgccgcgctggtcattgacaatggctccggcatgtgcaaagctggttttgctggggacgacgctccccgagccgtgtttccttccatcgtcgggcgccccagacaccagggcgtcatggtgggcatgggccagaaggactcctacgtgggcgacgaggcccagagcaagcgtggcatcctgaccctgaagtaccccattgagcatggcatcgtcaccaactgggacgacatggagaagatctggcaccacaccttctacaacgagctgcgcgtggccccggaggagcacccagtgctgctgaccgaggcccccctgaaccccaaggccaacagagagaagatgactcagattatgtttgagaccttcaacaccccggccatgtacgtggccatccaggccgtgctgtccctctacgcctctgggcgcaccactggcattgtcatggactctggagacggggtcacccacacggtgcccatctacgagggctacgccctcccccacgccatcctgcgtctggacctggctggccgggacctgaccgactacctcatgaagatcctcactgagcgaggctacagcttcaccaccacggccgagcgggaaatcgtgcgcgacatcaaggagaagctgtgctacgtcgccctggacttcgagcaggagatggccaccgccgcatcctcctcttctctggagaagagctacgagctgcccgatggccaggtcatcaccattggcaatgagcggttccggtgtccggaggcgctgttccagccttccttcctgggtatggaatcttgcggcatccacgagaccaccttcaactccatcatgaagtgtgacgtggacatccgcaaagacctgtacgccaacacggtgctgtcgggcggcaccaccatgtacccgggcattgccgacaggatgcagaaggagatcaccgccctggcgcccagcaccatgaagatcaagatcatcgcacccccagagcgcaagtactcggtgtggatcggtggctccatcctggcctcactgtccaccttccagcagatgtggattagcaagcaggagtacgacgagtcgggcccctccatcgtccaccgcaaatgcttctaaacggactcagcagatgcgtagcatttgctgcatgggttaattgagaatagaaatttgcccctggcaaatgcacacacctcatgctagcctcacgaaactggaataagccttcgaaaagaaattgtccttgaagcttgtatctgatatcagcactggattgtagaacttgttgctgattttgaccttgtattgaagttaactgttccccttggtatttgtttaataccctgtacatatctttgagttcaacctttagtacgtgtggcttggtcacttcgtggctaaggtaagaacgtgcttgtggaagacaagtctgtggcttggtgagtctgtgtggccagcagcctctgatctgtgcagggtattaacgtgtcagggctgagtgttctgggatttctctagaggctggcaagaaccagttgttttgtcttgcgggtctgtcagggttggaaagtccaagccgtaggacccagtttcctttcttagctgatgtctttggccagaacaccgtgggctgttacttgctttgagttggaagcggtttgcatttacgcctgtaaatgtattcattcttaatttatgtaaggttttttttgtacgcaattctcgattctttgaagagatgacaacaaattttggttttctactgttatgtgagaacattaggccccagcaacacgtcattgtgtaaggaaaaataaaagtgctgccgtaacc

SEQ ID NO: 6 - DNA, 1345 bp, Homo sapiens
gcctctggggttttatattgctctggtattcatgccaaagacacaccagccctcagtcactgggagaagaacctctcataccctcggtgctccagtccccagctcactcagccacacacaccatgtgtgaagaggagaccaccgcgctcgtgtgtgacaatggctctggcctgtgcaaggcaggcttcgcaggagatgatgccccccgggctgtcttcccctccattgtgggccgccctcgccaccagggtgtgatggtgggaatgggccagaaagacagctatgtgggggatgaggctcagagcaagcgagggatcctaactctcaaataccccattgaacacggcatcatcaccaactgggatgacatggagaagatctggcaccactccttctacaatgagctgcgtgtagcacctgaagagcaccccaccctgctcacagaggctcccctaaatcccaaggccaacagggaaaagatgacccagatcatgtttgaaaccttcaatgtccctgccatgtacgtcgccattcaagctgtgctctccctctatgcctctggccgcacgacaggcatcgtcctggattcaggtgatggcgtcacccacaatgtccccatctatgaaggctatgccctgccccatgccatcatgcgcctggacttggctggccgtgacctcacggactacctcatgaagatcctcacagagagaggctattcctttgtgaccacagctgagagagaaattgtgcgagacatcaaggagaagctgtgctatgtggccctggattttgagaatgagatggccacagcagcttcctcttcctccctggagaagagctatgagctgccagatgggcaggttatcaccattggcaatgagcgcttccgctgccctgagaccctcttccagccttcctttattggcatggagtccgctggaattcatgagacaacctacaattccatcatgaagtgtgacattgacatccgtaaggacttatatgccaacaatgtcctctctgggggcaccaccatgtaccctggcattgctgacaggatgcagaaggagatcacagccctggcccccagcaccatgaagatcaagattattgctcccccagagcggaagtactcagtctggatcgggggctctatcctggcctctctctccaccttccagcagatgtggatcagcaagcctgagtatgatgaggcagggccctccattgtccacaggaagtgcttctaaagtcagaacaggttctccaaggatcccctcgagactactctgttaccagtcatgaaacattaaaacctacaagccttaaaaaaaaaaaaaaa

SEQ ID NO: 7 - DNA, 3398 bp, Homo sapiens
cgctgtcgccgccagtagcagccttcgccagcagcgccgcggcggaaccgggcgcaggggagcgagcccggccccgccagcccagcccagcccagccctactccctccccacgccagggcagcagccgttgctcagagagaaggtggaggaagaaatccagaccctagcacgcgcgcaccatcatggaccattatgattctcagcaaaccaacgattacatgcagccagaagaggactgggaccgggacctgctcctggacccggcctgggagaagcagcagagaaagacattcacggcatggtgtaactcccacctccggaaggcggggacacagatcgagaacatcgaagaggacttccgggatggcctgaagctcatgctgctgctggaggtcatctcaggtgaacgcttggccaagccagagcgaggcaagatgagagtgcacaagatctccaacgtcaacaaggccctggatttcatagccagcaaaggcgtcaaactggtgtccatcggagccgaagaaatcgtggatgggaatgtgaagatgaccctgggcatgatctggaccatcatcctgcgctttgccatccaggacatctccgtggaagagacttcagccaaggaagggctgctcctgtggtgtcagagaaagacagccccttacaaaaatgtcaacatccagaacttccacataagctggaaggatggcctcggcttctgtgctttgatccaccgacaccggcccgagctgattgactacgggaagctgcggaaggatgatccactcacaaatctgaatacggcttttgacgtggcagagaagtacctggacatccccaagatgctggatgccgaagacatcgttggaactgcccgaccggatgagaaagccatcatgacttacgtgtctagcttctaccacgccttctctggagcccagaaggcggagacagcagccaatcgcatctgcaaggtgttggccgtcaaccaggagaacgagcagcttatggaagactacgagaagctggccagtgatctgttggagtggatccgccgcacaatcccgtggctggagaaccgggtgcccgagaacaccatgcatgccatgcaacagaagctggaggacttccgggactaccggcgcctgcacaagccgcccaaggtgcaggagaagtgccagctggagatcaacttcaacacgctgcagaccaagctgcggctcagcaaccggcctgccttcatgccctctgagggcaggatggtctcggacatcaacaatgcctggggctgcctggagcaggtggagaagggctatgaggagtggttgctgaatgagatccggaggctggagcgactggaccacctggcagagaagttccggcagaaggcctccatccacgaggcctggactgacggcaaagaggccatgctgcgacagaaggactatgagaccgccaccctctcggagatcaaggccctgctcaagaagcatgaggccttcgagagtgacctggctgcccaccaggaccgtgtggagcagattgccgccatcgcacaggagctcaatgagctggactattatgactcacccagtgtcaacgcccgttgccaaaagatctgtgaccagtgggacaatctgggggccctaactcagaagcgaagggaagctctggagcggaccgagaaactgctggagaccattgaccagctgtacttggagtatgccaagcgggctgcacccttcaacaactggatggagggggccatggaggacctgcaggacaccttcattgtgcacaccattgaggagatccagggactgaccacagcccatgagcagttcaaggccaccctccctgatgccgacaaggagcgcctggccatcctgggcatccacaatgaggtgtccaagattgtccagacctaccacgtcaatatggcgggcaccaacccctacacaaccatcacgcctcaggagatcaatggcaaatgggaccacgtgcggcagctggtgcctcggagggaccaagctctgacggaggagcatgcccgacagcagcacaatgagaggctacgcaagcagtttggagcccaggccaatgtcatcgggccctggatccagaccaagatggaggagatcgggaggatctccattgagatgcatgggaccctggaggaccagctcagccacctgcggcagtatgagaagagcatcgtcaactacaagccaaagattgatcagctggagggcgaccaccagctcatccaggaggcgctcatcttcgacaacaagcacaccaactacaccatggagcacatccgtgtgggctgggagcagctgctcaccaccatcgccaggaccatcaatgaggtagagaaccagatcctgacccgggatgccaagggcatcagccaggagcagatgaatgagttccgggcctccttcaaccactttgaccgggatcactccggcacactgggtcccgaggagttcaaagcctgcctcatcagcttgggttatgatattggcaacgacccccagggagaagcagaatttgcccgcatcatgagcattgtggaccccaaccgcctgggggtagtgacattccaggccttcattgacttcatgtcccgcgagacagccgacacagatacagcagaccaagtcatggcttccttcaagatcctggctggggacaagaactacattaccatggacgagctgcgccgcgagctgccacccgaccaggctgagtactgcatcgcgcggatggccccctacaccggccccgactccgtgccaggtgctctggactacatgtccttctccacggcgctgtacggcgagagtgacctctaatccaccccgcccggccgccctcgtcttgtgcgccgtgccctgccttgcacctccgccgtcgcccatctcctgcctgggttcggtttcagctcccagcctccacccgggtgagctggggcccacgtggcatcgatcctccctgcccgcgaagtgacagtttacaaaattattttctgcaaaaaagaaaaaaaagttacgttaaaaaccaaaaaactacatattttattatagaaaaagtattttttctccaccagacaaatggaaaaaaagaggaaagattaactatttgcaccgaaatgtcttgttttgttgcgacataggaaaataaccaagcacaaagttatattccatcctttttactgatttttttttcttctatctgttccatctgctgtattcatttctccaatctcatgtccattttggtgtgggagtcggggtagggggtactcttgtcaaaaggcacattggtgcgtgtgtgtttgctagctcacttgtccatgaaaatattttatgatattaaagaaaatcttttg

SEQ ID NO: 8 - DNA, 3878 bp, Homo sapiens
ggagcccggcggcggcttccggtcgggggaaaaaagttgggccgaaggaggggccgggaagacgcaagaggaagaagagaaaacggccgggcggcggtggctgtaggttgtgcggctgcagcggctcttccctgggcggacgatggacagccagggcaggaaggtggtggtgtgcgacaacggcaccgggtttgtgaagtgtggatatgcaggctctaactttccagaacacatcttcccagctttggttggaagacctattatcagatcaaccaccaaagtgggaaacattgaaatcaagaataacaaaaagatggatcttatggttggtgatgaggcaagtgaattacgatcaatgttagaagttaactaccctatggaaaatggcatagtacgaaattgggatgacatgaaacacctgtgggactacacatttggaccagagaaacttaatatagataccagaaattgtaaaatcttactcacagaacctcctatgaacccaaccaaaaacagagagaagattgtagaggtaatgtttgaaacttaccagttttccggtgtatatgtagccatccaggcagttctgactttgtacgctcaaggtttattgactggtgtagtggtagactctggagatggtgtgactcacatttgcccagtatatgaaggcttttctctccctcatcttaccaggagactggatattgctgggagggatataactagatatcttatcaagctacttctgttgcgaggatacgccttcaaccactctgctgattttgaaacggttcgcatgattaaagaaaaactgtgttacgtgggatataatattgagcaagagcagaaactggccttagaaaccacagtattagttgaatcttatacactcccagatggacgtatcatcaaagttgggggagagagatttgaagcaccagaagctttatttcagcctcacttgatcaatgttgaaggagttggtgttgctgaattgctttttaacacaattcaggcagctgacattgataccagatctgaattctacaaacacattgtgctttctggagggtctactatgtatcctggcctgccatcacggttggaacgagaacttaaacagctttacttagaacgagttttgaagggtgatgtggaaaaactttctaaatttaagatccgcattgaagacccaccccgcagaaagcacatggtattcctgggtggtgcagttctagcggatatcatgaaagacaaagacaacttttggatgacccgacaagagtaccaagaaaagggtgtccgtgtgctagagaaacttggtgtgactgttcgataaactccaaagcttgttcccgtcatacccgtaatgctttcttttttcctttattgccaatctttgaactcattcaactccaggacatggaagaggcctctctctgccctttgactggaaaggtcaagttttattctggtgtcttggggaagctttgttaaatttttgttaatgtgggtaaatctgagtttaattcaactgcttccctacatagactagagggctaaggattctgtctgctgctttgtttcttctaagtaggcatttagatcattcctgtaggcttcctattttcactttactgctctaatgctgctagtcgtagtctttagcacactaggtggtatgcctttattagcataaaacaaaaaaaactttaacaggagcttttacatattactgggatggggggtggttcgggatgggtgggcagctgctgaaccctttagggcatttcctctgtaatgtggcgctttcaactgtactgctgcagctttaagtaccttaaagcttctcctgtgaacttcttagggaaatgttaggttcagaactaaagtgttttgggtgggttttgttgcgggggggagggtaacaatgggtggtcttctgatttttatttttgaggttttgtcaactggagtacgtagaggaactttatttacagtactttgatttggcaggttttcttctacttgtgctctgcctggagctgtttccatatgatataaaaagcaagtgtagtattccattactatgtggcttagggatttatttgttttttaaaatcaaccatgttagctgggattagactccctacagtccttcaatggaaaagtaacatttaaaaatcctttgggtaattcgaattacagatttaaaagagcttaagatctggtgttttgttaatgcttctgtttattccagaagcattaaggtaacccattgccaagtatcattcttgcaaattattcttttatataactgaccagtgcttaataaaacaagcaggtacttacaaataattactggcagtaggttataattggtggtttaaaaataacattggaatacaggacttgttgccaattgggtaattttcattagttgttttgtttgttttgatttgaaacctggaaatacagtaaaatttgactgtttaaaatgttggccaaaaaaatcaagatttaatttttttatttgtactgaaaaactaatcataactgttaattctcagccatctttgaagcttgaaagaagagtctttggtattttgtaaacgttagcagactttcctgccagtgtcagaaaatcctatttatgaatcctgtcggtattccttggtatctgaaaaaaataccaaatagtaccatacatgagttatttctaagtttgaaaaataaaaagaaattgcatcacactaattacaaaatacaagttctggaaaaaatatttttcttcattttaaaacttttttttaactaataatggctttgaaagaagaggcttaatttgggggtggtaactaaaatcaaaagaaatgattgacttgagggtctctgtttggtaagaatacatcattagcttaaataagcagcagaaggttagttttaattatgtagcttctgttaatattaagtgttttttgtctgttttacctcaatttgaacagataagtttgcctgcatgctggacatgcctcagaaccatgaatagcccgtactagatcttgggaacatggatcttagagtcactttggaataagttcttatataaatacccccagccttttgagaacggggcttgttaaaggacgcgtatgtagggcccgtacctactggcagttgggttcagggaaatgggattgacttggccttcaggctcctttggtcataattttaaaatatgggagtagaaaacaacaaagaatggaatggactcttaaaacaatgaaagagcatttatcgtttgtcccttgaatgtagaatttgtttttgatttcataattctgctggtaaatgtgacagttaaaatggtgcattatgtatatatattataatttagaaataccattttataattttactattccagggtgacataatgcatttaaatttgggatttgggtggagtattatgtttaactggagttgtcaagtatgagtccctcaggaaaaaaaaaaattctgttttaaaaagcaatctgattcttagctcttgaaactattgctacttaaatttccaataattaaaaatttaaaatttttaaattagaattgccaatacttctacatttgagaagggtttttttagaaatacatttagtaaagtccccaagacattagtcttacatttaaacttttttctttaaaacatggttttggtggttaacttttacacagttctgagtactgttaatatctggaaagtatcttgagatatcagtggaaagctaaacagtctaaattaacatgaaatacttcattttgattgagaaaataaaatcagattttttcaaagtcaaaaaaaaaaaaaaaaaaaa

SEQ ID NO: 9 - DNA, 2728 bp, Homo sapiens
atcttggcttcccggggaaaggcggcgtgaggggaagaagttgtagggtgggggcaggagtgaggaggagggaagagagagggggaggaggccgcggcggggcagggcggggactgcctgcctgcctgggttgcggaagtgatagccgccgaccgagcctgctgctttcttgctactgcttcggcttcccggctaccccccggacggtgaaggcggcccagctgtggatggtcagatagcccttgtctcccgccgccaatctctggcccctagcagcacggagcagacggcggcagcagcagcagcaggcgaggaggaagatggcgggacggctgccggcctgtgtggtggactgtggcacggggtatacaaaactaggatatgctggaaatacagaaccacagtttatcatcccttcctgtattgctattaaggagtcagcaaaagtgggtgatcaagctcaaaggagggtgatgaaaggtgttgatgacctagacttcttcattggtgatgaagcaatagaaaaacctacatatgcaacaaagtggccaatccgccatggtatagttgaagattgggacttaatggaaaggtttatggagcaagtgatctttaaatatttaagggcagaacctgaagaccattattttcttttgactgaacctccattgaatactccagaaaacagggaatatactgctgaaataatgtttgagtccttcaatgttccaggcttgtacattgctgtgcaggctgttcttgccttagctgcatcttggacctcaagacaagtaggagaacggacgttgaccggtacggtaatagacagtggagatggtgtcactcatgtcattcctgtggctgaagggtatgtgattggcagctgtattaaacacattccaatcgcaggacgagatataacatattttattcagcaactgctgagagaccgagaagtaggaatccctccagaacaatccttggaaactgctaaggcagtaaaggagcgctatagttatgtctgcccagatttagtaaaagaatttaacaagtatgatacagatgggtcaaaatggattaaacagtatactggaatcaatgctatctcaaagaaagagttttctatcgatgttggttatgagagatttttgggacctgaaatcttttttcatccagagtttgctaatccagactttacacaacctatctcagaagttgtagatgaagtaattcagaattgtcctattgatgtcagacgtcctctctacaagaatattgtcctctctggaggttcaaccatgttcagggactttggacgtcgcttgcaaagagatttgaaaagaactgtagatgcccggctgaaattaagtgaggaattgagtggtggtagattgaagccaaaacctattgatgtacaagtcattacacaccacatgcagcgatatgcagtttggtttggaggatcaatgctggcttccacgcctgagttctaccaagtatgccacaccaaaaaggattatgaagaaattggacctagcatttgtcgtcacaatccagtgtttggagtcatgtcgtaaaattggcttcatagttattggggttagggaggtggggaagagataatctttctgattacctgttttgtctggatggctggttttgaggttttaaacctgacttgaaatagtaacaccaaacatgattatacaggaatattttaataagtgtatcaccatgcagatgtagaagagagcgaaagtgattgtgtttttctttagattgaatatttgaatcttatgtgtaacaaaaagaagtgggttttagttctttctgtgccctgatattttgtatattaatgaattatccaagattcgatgggatttatcagtgtgtagatagctctataatgcttgaattgtacacttctaagtgtgcagtgcaagagcttgtttatatttcatactttttatactttgaggaaaaaaagtcaaagaaaaattgtatttgagggaaaaaaccatgaccaagtaaaggataaattcaaaaaatagcctcatgagacttggcatacacactcgtgggattccagttattatggagtgcttccatccctctccaccccttccccccaaaaggttttctttgcaagtgcttttggaactaagagctagtatcttggattaactgatgcctgctagtgctttctgattactcgcattctgtttcttgctttaaaagaagagtaaagacaagagtgttggaccagtattgcagttctgtagtgtcatttcttataaaaaacaaaacaacaacaataatttatcaaaattggcatatttaaagcctaacattctaataaaggcacaaatttctttttaatacttgtttcagcctctttaatctctttataagttaactaataaatctattttcttcagacttctgcaatagttctttaaaatcacaacagttagcaagctgacttttgtaatgtgctcaatacaaatacttgtgaacttttaatatgttgagtgctttcattttgataactggatctccatttgatattttcatttgtataactcatttgcagtctgaaaattttttttagtgccagtccctgaacatatcattgaaagttaattttctttgcattttaaaatatctggattatgaagaaaaagtgatgaaaataaattaaaactgaattacaaaaaaaaaaaaaaaa

SEQ ID NO: 10 - DNA, 2199 bp, Homo sapiens
cagcggcgctgcggcggctcgcgggagacgctgcgcgcggggctagcgggcggcggagcggacggcgacggggcgctctcgggctgccggcggggccgagcgccgcgcgtcccgagcatggcaggctccctgcctccctgcgtggtggactgtggcaccgggtataccaagcttggctacgcaggcaacactgagccccagttcattattccttcatgtattgccatcagagagtcagcaaaggtagttgaccaagctcaaaggagagtgttgaggggagttgatgaccttgactttttcataggagatgaagccatcgataaacctacatatgctacaaagtggccgatacgacatggaatcattgaagactgggatcttatggaaaggttcatggagcaagtggtttttaaatatcttcgagctgaacctgaggaccattattttttaatgacagaacctccactcaatacaccagaaaacagagagtatcttgcagaaattatgtttgaatcatttaacgtaccaggactctacattgcagttcaggcagtgctggccttggcggcatcttggacatctcgacaagtgggtgaacgtacgttaacggggatagtcattgacagcggagatggagtcacccatgttatcccagtggcagaaggttatgtaattggaagctgcatcaaacacatcccgattgcaggtagagatattacgtatttcattcaacagctgctaagggagagggaggtgggaatccctcctgagcagtcactggagaccgcaaaagccattaaggagaaatactgttacatttgccccgatatagtcaaggaatttgccaagtatgatgtggatccccggaagtggatcaaacagtacacgggtatcaatgcgatcaaccagaagaagtttgttatagacgttggttacgaaagattcctgggacctgaaatattctttcacccggagtttgccaacccagactttatggagtccatctcagatgttgttgatgaagtaatacagaactgccccatcgatgtgcggcgcccgctgtataagaatgtcgtactctcaggaggctccaccatgttcagggatttcggacgccgactgcagagggatttgaagagagtggtggatgctaggctgaggctcagcgaggagctcagcggcgggaggatcaagccgaagcctgtggaggtccaggtggtcacgcatcacatgcagcgctacgccgtgtggttcggaggctccatgctggcctcgactcccgagttctttcaggtctgccacaccaagaaggactatgaagagtacgggcccagcatctgccgccacaaccccgtctttggagtcatgtcctagtgtctgcctgaacgcgtcgttcgatggtgtcacgttggggaacaagtgtccttcagaacccagagaaggccgccgttctgtaaatagcgacgtcggtgttgctgcccagcagcgtgcttgcattgccggtgcatgaggcgcggcgcgggcccttcagtaaaagccatttatccgtgtgccgaccgctgtctgccagcctcctccttctcccgccctcctcaccctcgctctccctcctcctcctcctccgagctgctagctgacaaatacaattctgaaggaatccaaatgtgactttgaaaattgttagagaaaacaacattagaaaatggcgcaaaatcgttaggtcccaggagagaatgtgggggcgcaaacccttttcctcccagcctatttttgtaaataaaatgtttaaacttgaaatacaaatcgatgtttatatttcctatcattttgtattttatggtatttggtacaactggctgatactaagcacgaatagatattgatgttatggagtgctgtaatccaaagtttttaattgtgaggcatgttctgatatgtttataggcaaacaaataaaacagcaaacttttttgccacatgtttgctagaaaatgattatactttattggagtgacatgaagtttgaacactaaacagtaatgtatgagaattactacagatacatgtatcttttagttttttttgtttgaactttctggagctgttttatagaagatgatggtttgttgtcggtgagtgttggatgaaatacttccttgcaccattgtaataaaagctgttagaatatttgtaaatatc

SEQ ID NO: 11 - DNA, 2952 bp, Homo sapiens
gaagcgaatagcgttttcagagatattgggcggctcaagggtcttactctgtcgcccagtctgtaatgcagtgctgtgaccatagcccactgcagcctccacctcccaggctcaagcagtccttcccccctcgccctcatgaatagctgggactacagcctggagcattggtaagcgtcacactgccaaagtgagagctgctggagaactcataatcccaggaacgcctcttctactctccgagtaccccagtgaccagagtgagagaagctctgaacgagggcacgcggcttgaaggactgtgggcagatgtgaccaagagcctgcattaagttgtacaatggtagatggagtgatgattcttcctgtgcttatcatgattgctctcccctcccctagtatggaagatgagaagcccaaggtcaaccccaaactctacatgtgtgtgtgtgaaggtctctcctgcggtaatgaggaccactgtgaaggccagcagtgcttttcctcactgagcatcaacgatggcttccacgtctaccagaaaggctgcttccaggtttatgagcagggaaagatgacctgtaagaccccgccgtcccctggccaagctgtggagtgctgccaaggggactggtgtaacaggaacatcacggcccagctgcccactaaaggaaaatccttccctggaacacagaatttccacttggaggttggcctcattattctctctgtagtgttcgcagtatgtcttttagcctgcctgctgggagttgctctccgaaaatttaaaaggcgcaaccaagaacgcctcaatccccgagacgtggagtatggcactatcgaagggctcatcaccaccaatgttggagacagcactttagcagatttattggatcattcgtgtacatcaggaagtggctctggtcttccttttctggtacaaagaacagtggctcgccagattacactgttggagtgtgtcgggaaaggcaggtatggtgaggtgtggaggggcagctggcaaggggaaaatgttgccgtgaagatcttctcctcccgtgatgagaagtcatggttcagggaaacggaattgtacaacactgtgatgctgaggcatgaaaatatcttaggtttcattgcttcagacatgacatcaagacactccagtacccagctgtggttaattacacattatcatgaaatgggatcgttgtacgactatcttcagcttactactctggatacagttagctgccttcgaatagtgctgtccatagctagtggtcttgcacatttgcacatagagatatttgggacccaagggaaaccagccattgcccatcgagatttaaagagcaaaaatattctggttaagaagaatggacagtgttgcatagcagatttgggcctggcagtcatgcattcccagagcaccaatcagcttgatgtggggaacaatccccgtgtgggcaccaagcgctacatggcccccgaagttctagatgaaaccatccaggtggattgtttcgattcttataaaagggtcgatatttgggcctttggacttgttttgtgggaagtggccaggcggatggtgagcaatggtatagtggaggattacaagccaccgttctacgatgtggttcccaatgacccaagttttgaagatatgaggaaggtagtctgtgtggatcaacaaaggccaaacatacccaacagatggttctcagacccgacattaacctctctggccaagctaatgaaagaatgctggtatcaaaatccatccgcaagactcacagcactgcgtatcaaaaagactttgaccaaaattgataattccctcgacaaattgaaaactgactgttgacattttcatagtgtcaagaaggaagatttgacgttgttgtcattgtccagctgggacctaatgctggcctgactggttgtcagaatggaatccatctgtctccctccccaaatggctgctttgacaaggcagacgtcgtacccagccatgtgttggggagacatcaaaaccaccctaacctcgctcgatgactgtgaactgggcatttcacgaactgttcacactgcagagactaatgttggacagacactgttgcaaaggtagggactggaggaacacagagaaatcctaaaagagatctgggcattaagtcagtggctttgcatagctttcacaagtctcctagacactccccacgggaaactcaaggaggtggtgaatttttaatcagcaatattgcctgtgcttctcttctttattgcactaggaattctttgcattccttacttgcactgttactcttaattttaaagacccaacttgccaaaatgttggctgcgtactccactggtctgtctttggataataggaattcaatttggcaaaacaaaatgtaatgtcagactttgctgcattttacacatgtgctgatgtttacaatgatgccgaacattaggaattgtttatacacaactttgcaaattatttattacttgtgcacttagtagtttttacaaaactgctttgtgcatatgttaaagcttatttttatgtggtcttatgattttattacagaaatgtttttaacactatactctaaaatggacattttcttttattatcagttaaaatcacattttaagtgcttcacatttgtatgtgtgtagactgtaactttttttcagttcatatgcagaacgtatttagccattacccacgtgacaccaccgaatatattatcgatttagaagcaaagatttcagtagaattttagtcctgaacgctacggggaaaatgcattttcttcagaattatccattacgtgcatttaaactctgccagaaaaaaataactattttgttttaatctactttttgtatttagtagttatttgtataaattaaataaactgttttcaagtc

SEQ ID NO: 12 - DNA, 4540 bp, Homo sapiens
cgctgctgggctgcggcggcggcggcggcggcggtggttactatggcggagtcggccggagcctcctccttcttcccccttgttgtcctcctgctcgccggcagcggcgggtccgggccccggggggtccaggctctgctgtgtgcgtgcaccagctgcctccaggccaactacacgtgtgagacagatggggcctgcatggtttccattttcaatctggatgggatggagcaccatgtgcgcacctgcatccccaaagtggagctggtccctgccgggaagcccttctactgcctgagctcggaggacctgcgcaacacccactgctgctacactgactactgcaacaggatcgacttgagggtgcccagtggtcacctcaaggagcctgagcacccgtccatgtggggcccggtggagctggtaggcatcatcgccggcccggtgttcctcctgttcctcatcatcatcattgttttccttgtcattaactatcatcagcgtgtctatcacaaccgccagagactggacatggaagatccctcatgtgagatgtgtctctccaaagacaagacgctccaggatcttgtctacgatctctccacctcagggtctggctcagggttacccctctttgtccagcgcacagtggcccgaaccatcgttttacaagagattattggcaagggtcggtttggggaagtatggcggggccgctggaggggtggtgatgtggctgtgaaaatattctcttctcgtgaagaacggtcttggttcagggaagcagagatataccagacggtcatgctgcgccatgaaaacatccttggatttattgctgctgacaataaagataatggcacctggacacagctgtggcttgtttctgactatcatgagcacgggtccctgtttgattatctgaaccggtacacagtgacaattgaggggatgattaagctggccttgtctgctgctagtgggctggcacacctgcacatggagatcgtgggcacccaagggaagcctggaattgctcatcgagacttaaagtcaaagaacattctggtgaagaaaaatggcatgtgtgccatagcagacctgggcctggctgtccgtcatgatgcagtcactgacaccattgacattgccccgaatcagagggtggggaccaaacgatacatggcccctgaagtacttgatgaaaccattaatatgaaacactttgactcctttaaatgtgctgatatttatgccctcgggcttgtatattgggagattgctcgaagatgcaattctggaggagtccatgaagaatatcagctgccatattacgacttagtgccctctgacccttccattgaggaaatgcgaaaggttgtatgtgatcagaagctgcgtcccaacatccccaactggtggcagagttatgaggcactgcgggtgatggggaagatgatgcgagagtgttggtatgccaacggcgcagcccgcctgacggccctgcgcatcaagaagaccctctcccagctcagcgtgcaggaagacgtgaagatctaactgctccctctctccacacggagctcctggcagcgagaactacgcacagctgccgcgttgagcgtacgatggaggcctacctctcgtttctgcccagccctctgtggccaggagccctggcccgcaagagggacagagcccgggagagactcgctcactcccatgttgggtttgagacagacaccttttctatttacctcctaatggcatggagactctgagagcgaattgtgtggagaactcagtgccacacctcgaactggttgtagtgggaagtcccgcgaaacccggtgcatctggcacgtggccaggagccatgacaggggcgcttgggaggggccggaggaaccgaggtgttgccagtgctaagctgccctgagggtttccttcggggaccagcccacagcacaccaaggtggcccggaagaaccagaagtgcagcccctctcacaggcagctctgagccgcgctttcccctcctccctgggatggacgctgccgggagactgccagtggagacggaatctgccgctttgtctgtccagccgtgtgtgcatgtgccgaggtgcgtcccccgttgtgcctggttcgtgccatgcccttacacgtgcgtgtgagtgtgtgtgtgtgtctgtaggtgcgcacttacctgcttgagctttctgtgcatgtgcaggtcgggggtgtggtcgtcatgctgtccgtgcttgctggtgcctcttttcagtagtgagcagcatctagtttccctggtgcccttccctggaggtctctccctcccccagagcccctcatgccacagtggtactctgtgtctggcaggctactctgcccaccccagcatcagcacagctctcctcctccatctcagactgtggaaccaaagctggcccagttgtccatgacaaaagaggcttttgggccaaaatgtgagggtggtgggtgggatgggcagggaaggaatcctggtggaagtcttgggtgttagtgtcagccgtgggaaatgagccagcccaagggcatcatcctcagcagcatcgaggaagggccgaggaatgtgaagccagatctcgggactcagattggaatgttacatctgtctttcatctcccagatcctggaaacagcagtgtatatttttggtggtggtgggtttggggtggggaagggaagggcgggcaaggagtggggagggagtctggggtgggagggaggcatctgcatgggtcttcttttactggactgtctgatcagggtggagggaaggtgagaggtttgcatccacttcaggagccctactgaagggaacagcctgagccgaacatgttatttaacctgagtatagtatttaacgaagcctagaagcacggctgtgggtggtgatttggtcagcatatcttaggtatataataactttgaagccataacttttaactggagtggtttgatttctttttttaattttattgggagggtttggattttaactttttttaatgttgttaaatattaagtttttgtaaaaggaaaaccatctctgtgattacctctcaatctatttgtttttaaagaaatccctaaaaaaaaaaattatccaattgaacgcacatagctcaatcacactggaaatgtttgtcgttgcacctgagcctgttcccactcagcagtgagagttcctctttgccctgaggctcagtctctctcgtattttgtccccacccccaattccttgagtggtttttgctctagggccctttcttgcactgtccagctggttgtaccctctccaggcatttattcaacaaatgtgggtgaagtgcctgctgggtgccaggtgctgggaatacatctgtggacaagacatgcttgggtcctactcctggagcactgtaaaaagagctgattcaagtaagtagatgcctgttttgagaccagaaggtttcataattggttctacgacccttttgagcctagaattattgttcttatataagatcactgaagaaagaggaacccccacaaccccctccacaaagagaccaggggcgggtgatgagacctggggtttagaaccccaggtgagacctcaaatcactgcattcattctgagcccccttcctgtccccaggggaggtgtattgtgtatgtagccttagagcatctctgcctccaacccagcagttctctgccaaagcttgtggaggagggagagccctgtccctgccctcaggctccccagtgctcctggcccttctatttatttgactgattattgcttctttccttgcattaaaggagatcttcccctaacctttgggccaatttactggccactaatttcgtttaaataccattgtgtcattggggggaccgtctttacccctgctgacctcccacctatccgccctgcagcagaaccttggcggtttataggtaatgatggaacttagactcctcttcccagagtcacaagtagcctctgggatctgccaacacacgtccactcccaagccactagcccactccccagttggcccttctgcccttaccccacacacagtccaactcttccacctctggggaagatggagcaggtctttgggaagctcccacacccacctctgccactcttaacactaagtgagagttggggagaaactgaagccgtgtttttggccccccgaggctaaccctgatccatagtgctacctgcacctctggattctggattcacagaccaagtccaagcccgttcttacgtcgccataaaggcccccgaacggcattctcggtacttctgtttgtttttgtacattttattagaaaggactgtaaaatagccacttagacactttacctcttcagtatgcaaatgtaaataaattgtaatataggaaatcttttgttttaatataagaatgagcctgtccaatttctgctgtacattattaaaagttttattcacaaaaaaaaaaaaaaa

SEQ ID NO: 13 - DNA, 3267 bp, Homo sapiens
ggtcaccgcccggctgcggggccagtggcaggagcgccacgcaccgccagccgcagggggcgtgggatgggggcggccggggaggggggcgcccacactgactagagccaaccgcgcacttcaaaagggtgtcggtgccgcgctcccctcccgcggcccgggaacttcaaagcgggccgtgctgccccggctgcctcgctctgctctggggcctcgcagccccggcgcggccgcctggtggcgatgacccgggcgctctgctcagcgctccgccaggctctcctgctgctcgcagcggccgccgagctctcgccaggactgaagtgtgtatgtcttttgtgtgattcttcaaactttacctgccaaacagaaggagcatgttgggcatcagtcatgctaaccaatggaaaagagcaggtgatcaaatcctgtgtctcccttccagaactgaatgctcaagtcttctgtcatagttccaacaatgttaccaaaaccgaatgctgcttcacagatttttgcaacaacataacactgcaccttccaacagcatcaccaaatgccccaaaacttggacccatggagctggccatcattattactgtgcctgtttgcctcctgtccatagctgcgatgctgacagtatgggcatgccagggtcgacagtgctcctacaggaagaaaaagagaccaaatgtggaggaaccactctctgagtgcaatctggtaaatgctggaaaaactctgaaagatctgatttatgatgtgaccgcctctggatctggctctggtctacctctgttggttcaaaggacaattgcaaggacgattgtgcttcaggaaatagtaggaaaaggtagatttggtgaggtgtggcatggaagatggtgtggggaagatgtggctgtgaaaatattctcctccagagatgaaagatattggtttcgtgaggcagaaatttaccagacggtcatgctgcgacatgaaaacatccttggtttcattgctgctgacaacaaagataatggaacttggactcaactttggctggtatctgaatatcatgaacagggctccttatatgactatttgaatagaaatatagtgaccatggctggaatgatcaagctggcgctctcaattgctagtggtctggcacaccttcatatggagattgttggtacacaaggtaaacctgctattgctcatcgagacataaaatcaaagaatatcttagtaaaaaagtgtgaaacttgtgccatagcggacttagggttggctgtgaagcatgattcaatactgaacactatcgacatacctcagaatcctaaagtgggaaccaagaggtatatggctcctgaaatgcttgatgatacaatgaatgtgaatatctttgagtccttcaaacgagctgacatctattctgttggtctggtttactgggaaatagcccggaggtgttcagtcggaggaattgttgaggagtaccaattgccttattatgacatggtgccttcagatccctcgatagaggaaatgagaaaggttgtttgtgaccagaagtttcgaccaagtatcccaaaccagtggcaaagttgtgaagcactccgagtcatggggagaataatgcgtgagtgttggtatgccaacggagcggcccgcctaactgctcttcgtattaagaagactatatctcaactttgtgtcaaagaagactgcaaagcctaatgatgataattatgttaaaaagaaatctctcatagctttcttttccattttcccctttatgtgaatgtttttgccattttttttttgttctacctcaaagataagacagtacagtatttaagtgcccataaggcagcatgaaaagataactctaaagttaagcatgggcaggagttgacttcatccaatctctatgttatgtttaattttattttgaaagcaacacctcaactcatctttttatttaataaggaagaaatatattacaaaagtataaaataagctctataaaaatgttatagtcattaagtttttattttacttgaaccaagagcacatgaatgaacaggaaaagatgtaaaaacatttttttctgagatgaaaacatattaattaaacatgcaaattagagcatgctatctttaggtgatgcaatctatgtttccccctttttaagttagcaggactttttaaaaataaatattgctctaaactttaatatatcgaacgtgagagtggagctgcttagtggaagatgtaagtgaggtgggtgtcccatgtgcttggtctccccttctgctgttctcctgttcttcataatccactactgcagcagtccctgaaccactaaacttgttcctttcatttacaaaagagatacctgacatcctgagacactgagaaatgtcctgaagtcacacagctaatggcagaactggcactaggtccaaatcttgtgataatgaacaccgtaaggttagctagcttcctactttcccttgaatagtgcttttctccctatgtaatatcttttattatgatatttgtggtttagaaggcatattgagttattttgcagaatcataatggacccgcacaaaatctcagaaccatatctgttgacattttttctcatagaaatatcatggttaccccatttgttaatgagcattaatgttttctgaacacttccaaagattaatcaaacataaatattcattgtctgaaaatgtctttaagatacaattcagaggtccctatttcctttgtacatacacacttagaaagaaaagacagaaaaggaagaggaaggaaggaaatattttgagaatatattgagaagaattaagaaaactcttcaatgaagtgttaacaaccaaaccctacagacggtatcagaaacagcaaatagatattcctctaccctttcacagtgagtgagtgagtacagaagaatgctcatgatagttttgccttcattctactttctgtggacacagagtaatgaatatttaatgggacattaaatatgcccttcaaatctataattttactttggtaaacgagatttaacatgatgtcttttatgctcctaaaacatcttttttcaaactccattccttagaacattcttctactgagatgatccaagaccaaaagtgttctttggtacttgcttataaagtgatagtacatgttagcatataatgtattttgaagagtgaagtaaatgctattgataacagaaaaaaaaaaaaaaaa

SEQ ID NO: 14 - DNA, 5244 bp, Homo sapiens
tttttttttttttttttttttttttttggtctgggcttccgaatatgttttatgacggttgattttacaccaggaggtttgtctccgaggaagacccagggaactggatatctagcgagaacttcctccggattccccggcgcctcgggaaaatgggagctgctgcaaagttggcgtttgccgtctttcttatctcctgttcttcaggtgctatacttggtagatcagaaactcaggagtgtcttttctttaatgctaattgggaaaaagacagaaccaatcaaactggtgttgaaccgtgttatggtgacaaagataaacggcggcattgttttgctacctggaagaatatttctggttccattgaaatagtgaaacaaggttgttggctggatgatatcaactgctatgacaggactgattgtgtagaaaaaaaagacagccctgaagtatatttttgttgctgtgagggcaatatgtgtaatgaaaagttttcttattttccggagatggaagtcacacagcccacttcaaatccagttacacctaagccaccctattacaacatcctgctctattccttggtgccacttatgttaattgcggggattgtcatttgtgcattttgggtgtacaggcatcacaagatggcctaccctcctgtacttgttccaactcaagacccaggaccacccccaccttctccattactaggtttgaaaccactgcagttattagaagtgaaagcaaggggaagatttggttgtgtctggaaagcccagttgcttaacgaatatgtggctgtcaaaatatttccaatacaggacaaacagtcatggcaaaatgaatacgaagtctacagtttgcctggaatgaagcatgagaacatattacagttcattggtgcagaaaaacgaggcaccagtgttgatgtggatctttggctgatcacagcatttcatgaaaagggttcactatcagactttcttaaggctaatgtggtctcttggaatgaactgtgtcatattgcagaaaccatggctagaggattggcatatttacatgaggatatacctggcctaaaagatggccacaaacctgccatatctcacagggacatcaaaagtaaaaatgtgctgttgaaaaacaacctgacagcttgcattgctgactttgggttggccttaaaatttgaggctggcaagtctgcaggcgatacccatggacaggttggtacccggaggtacatggctccagaggtattagagggtgctataaacttccaaagggatgcatttttgaggatagatatgtatgccatgggattagtcctatgggaactggcttctcgctgtactgctgcagatggacctgtagatgaatacatgttgccatttgaggaggaaattggccagcatccatctcttgaagacatgcaggaagttgttgtgcataaaaaaaagaggcctgttttaagagattattggcagaaacatgctggaatggcaatgctctgtgaaaccattgaagaatgttgggatcacgacgcagaagccaggttatcagctggatgtgtaggtgaaagaattacccagatgcagagactaacaaatattattaccacagaggacattgtaacagtggtcacaatggtgacaaatgttgactttcctcccaaagaatctagtctatgatggttgcgccatctgtgcacactaagaaatgggactctgaactggagctgctaagctaaagaaactgcttacagtttattttctgtgtaaaatgagtaggatgtctcttggaaatgttaagaaagaagaccctttgttgaaaaatgttgctctgggagacttactgcattgccgacagcacagatgtgaaggacatgagactaagagaaaccttgcaaactctataaagaaacttttgaaaaagtgtacatgaagaatgtagccctctccaaatcaaggatcttttggacctggctaatggagtgtttgaaaactgacatcagatttcttaatgtctgtcagaagacactaattccttaaatgaactactgctattttttttaaatcaaaaacttttcatttcagattttaaaaagggtaacttgtttttattgcatttgctgttgtttctataaatgactattgtaatgccaatatgacacagcttgtgaatgtttagtgtgctgctgttctgtgtacataaagtcatcaaagtggggtacagtaaagaggcttccaagcattactttaacctccctcaacaaggtatacctcagttccacggttgctaaattataaaattgaaaacactaacaaaatttgaataataaatcgatccatgttttgtaacaaattcactgtgttatttaaggaaaaaaaggtaagctatgcttagtgccaacaataagtggccattcgtaaagcagtgttttagcatttcttgtgctggcttgtaatgtagggaaaaaaagtgctgttttttgaaaagatggtgtcatttcccccttcttcccatgttttaaagccccatcttatatccagttcccaaaatttgcatacttacctaagtattttttttaggtgtgctgtgtttggggaatatttgaaaatttaaagcatgatttaaaattttttaaagtgagctgtgacactggaaagctcttcattttatcttttaaaatagagttttttctatttatatatgtaaaattgtagtgtatttcttttcaccaaacagtgtgtgggacattctttatcactgttttaggatcacctcaggaagtgtcgttacccagaattccccactgtctgctatgagacttgtaactttatcactatacttctgcttggtgccatcttgtcagagtaatatttgatgtctgtgatatgtaaagaattatcctaggataaagatattaaactttaagcagatttcagatgttactgctttaaaacaaatcagggataacaaattaaacgtataacttaaaatatgcaatgacatttagaggtaaccaatgttgatataggtagcatagcctagcctcctccccaaaattgcttttacaactaacactgatactaatttaggatagttcatgccttatccttgctaagaaaatggaattgatggtaggcaggtgctaaagtgcttttcaaaacaatattacgttagaatacaattggattcttcctcaaatttatacaggccaaaaagtaaaacattaattttctgaatttccagattaccaatcaattaatcaacaaatagccagtattatgctgtgtatttctgtcaggtcattttaaaatccatgttaattttataaaagaattttttacatgtcactgtcaggagctcactgtgaatgtgttgtcttcaaatggttatttaaccacacagtacactacattttacatatatgtacgtaatctctgggaatagtaaattaattatgttatttataaacaatacataggtcaacagactttaagcagggaggaaaagaagagtaatagcgtctgtgtgctgcagaccattcagaactgtcacgtgtgtccccatggtctcattcattgtattcctagcaattcccttttcaatgttgagttcacctctttatttcacaaagtacttggtctctcaatttcttgatctggttttgcttccatttaaaaactaatcaagaagggaaaatattgagaatgtgcatacaagaaaatcattaatttcctgaagatgaatttctacctgttgtgaacatttaactttctttttaaaagttaaacaaaaataaacaagggatattatgatgaatgtttggcttatgtgagtactagagataaaatttttaaacccagttattcacaatataaaatgttttcaagttagaaaaaatttttagaaatcctgggtattgtatttaactgtagctaaccaattttaaaacttgtattcttttgagaactattattaatagaaaaactttttataagcagtaaaataagaatgttccagtgactacctgtccttatacctagtcttgttaaaactttcttttgcagggtatttagtgtttggtttacagtcagtgcagagtgggcaagttaacagaaagtttgagctagagatactggaaaaaaaaaagatcaaagaatgagaaaaatggtgatccattttggggcaaactgagaccccccaaataactctttcctcatgtgtatggtgctcctcatgactcgtcttgtattttgcctttctgatacccatcagaactgctgctgctctaacttatactctttaccttgcccagatctccgcgtaaggaatgctttatgatcaacttgccataggactgatggattaaccagtgttcggctttatttgaagtctatgccctgcacagctcttgtatgtattttagatgctagaagtttttttagcatgtgatgtgtgattcttgtttgaattctaggtaccttgtgaattccagaaaaagagactgtgcttcacgattgttagtcccatgaacttgcactatctatctttcatggtgatgttttgaaaatacaatcaggaaaaaacccaacacctttggaatttaaaatagaatcatatcatgaaatttaaaaagaatctcttctgttgcatttcctcacccctaagtaacagctacatttaagtaaaatgcaggtggtaggggaaaaaaaaccatggcgagatggtggtttagtggaataaactgattactggtttttttgtttttttttttttttttaaagaaagaagcttcatcacagatactttccagtttctcttttatacttttttgaaagattactttttaggaacatttggtatgatatgcataaaattatttatccatttatgggcaaaatgatacaagtagcatcttgattgaacatcatttacctcagatattcaaccagcagtacgttttttatgcagtctcaacccatatcccatttgttacctctcagaatattggtaagcagttattttcgctttactctgtatttcttgtgttttgggcacaggttattgtactactgtcaaatcgtacttgctattttttctgcaagtatttaacagaaagcttaaaatccccataaaaccccaccttggataagtgattgttaaatattgtacaaataaaatgtatgctatccccattccatccccaagttaaataaaaaaatgaatacggta

SEQ ID NO: 15 - DNA, 11373 bp, Homo sapiens
gtgcgcggggcggcgccgcggaacatgacggcgccctgggtggccctcgccctcctctggggatcgctgtgcgccggctctgggcgtggggaggctgagacacgggagtgcatctactacaacgccaactgggagctggagcgcaccaaccagagcggcctggagcgctgcgaaggcgagcaggacaagcggctgcactgctacgcctcctggcgcaacagctctggcaccatcgagctcgtgaagaagggctgctggctagatgacttcaactgctacgataggcaggagtgtgtggccactgaggagaacccccaggtgtacttctgctgctgtgaaggcaacttctgcaacgaacgcttcactcatttgccagaggctgggggcccggaagtcacgtacgagccacccccgacagcccccaccctgctcacggtgctggcctactcactgctgcccatcgggggcctttccctcatcgtcctgctggccttttggatgtaccggcatcgcaagcccccctacggtcatgtggacatccatgaggaccctgggcctccaccaccatcccctctggtgggcctgaagccactgcagctgctggagatcaaggctcgggggcgctttggctgtgtctggaaggcccagctcatgaatgactttgtagctgtcaagatcttcccactccaggacaagcagtcgtggcagagtgaacgggagatcttcagcacacctggcatgaagcacgagaacctgctacagttcattgctgccgagaagcgaggctccaacctcgaagtagagctgtggctcatcacggccttccatgacaagggctccctcacggattacctcaaggggaacatcatcacatggaacgaactgtgtcatgtagcagagacgatgtcacgaggcctctcatacctgcatgaggatgtgccctggtgccgtggcgagggccacaagccgtctattgcccacagggactttaaaagtaagaatgtattgctgaagagcgacctcacagccgtgctggctgactttggcttggctgttcgatttgagccagggaaacctccaggggacacccacggacaggtaggcacgagacggtacatggctcctgaggtgctcgagggagccatcaacttccagagagatgccttcctgcgcattgacatgtatgccatggggttggtgctgtgggagcttgtgtctcgctgcaaggctgcagacggacccgtggatgagtacatgctgccctttgaggaagagattggccagcacccttcgttggaggagctgcaggaggtggtggtgcacaagaagatgaggcccaccattaaagatcactggttgaaacacccgggcctggcccagctttgtgtgaccatcgaggagtgctgggaccatgatgcagaggctcgcttgtccgcgggctgtgtggaggagcgggtgtccctgattcggaggtcggtcaacggcactacctcggactgtctcgtttccctggtgacctctgtcaccaatgtggacctgccccctaaagagtcaagcatctaagcccaggacatgagtgtctgtccagactcagtggatctgaagaaaaaaggaaaaaaagttgtgttttgttttggaaatcccataaaaccaacaaacacataaaatgcagctgctattttaccttgactttttattattattattataattattataattattattattaatattattttttggattggatcagtttttaccagcatattgctctactgtatcacaaacagcggacacgtcagcaggcgttgaggtgctgagctgtggatgcagaaccagcgccatgctgaagagcctcagccacctcctgtcctttgggattcgtttttcccgctttctctttgtttgtcgtctcagaatctgtgacacaaagaaacccatctcctgtcttaggaaacctaatgctgcaaactctacctagaggaacctttgaagactgttacataagaacataccttcctcagaagaggagtttcctctgccctctgcccttctcccctgcctccctccctcccctccttttattttgttttagtgagcttaagaaacagcagatgtgtctttcacggatctaacgggtgttgtcctgatcgagaaaaaaactgggatgagaatggtttggactggagttggaaggggaggacggtactgggggtagggtttggaacagagctacactggactcgggcacattcggagcagcatcctttagtatggaggctacttctcaggtaaccaggaattgaggggaaggaccttgtggaggccgagcattaacagcaagagcggggtttggagaaagtctgagattgggtgcagccctgacttacctgctggccctgaccagtttcttttcactaacttggccttgggcataggatgaaacattttttctgccctaattttaaaactaggtgagggtagaatcatcacaggttaggaatacattcttcataagacacgatgctgtaaatacccttaatggacgaaaagttgaaatacttttgtttcctcttggagcagttcagggaaatgcccacaggggattgtcctgcacagatagggcaagaggatttcctgggtggagtctgccaaggcctgcctcgctggggaccccagagtcctgcacctctggttccgccccaggtggtgacattactgtccccgttctgtggctcgtggacaagactttctccagaccccttaaagtggtacatattctaaaaaactgtttttctattatgccataaccttgctctagtcagtgaatgttcctaatgctgctgtttcaacatttgaattctttttaatttatgaaacatgctaaattttttttttcaaacaaaacacacacatccacatatacacatgcttcgctatgtggcttccaaggtttaaattttgaaaagtaaaagaattaaaacttcacgaccacagatcacctcaaaccagaaatacctcagaattttctacttatgtaaggtttattatatattttgttagttgtgttgtcttgtagtaagtatattttaatgtaagttggcttttgtgacaaggaagtttaaaagaaatagagaaaaagaaaaaagtttgcatcttctagggagtgctaccatttttgtttgataacgcccccttgtaaataattgtcatcaactgtaggttggctgtctgggccaagtctgggcatttatcagtcttgtttgtgaaggcttttccttctggtttctttagatcattttatttaaaaacagtgcatctcttcatcgtgagggtaggcaaggcgggggccgtggggagaggttgacctgggtgagaactgaagaggccgcctcctcttgggttgtttggagcttcacatgtaattcacatgtaacatgtaacttgatcggtcagtgttcagaatgacaagtaaccccgcttaaacttggtagaaggatggcccttagacctgaatggggtgattttacttgggatttaacttcttcagcaaattaacagcaacgttggaagagatctgtggcgcctctgtgaagcacaccgtgactcaggccagtcttttagtgcagcgtgtctgggagtgaagggttttgcccttgctggtcttggagtccacagtgtgaggggcactgcacatgcctgggcatctacctagtgtgctatgttcagtgtctggggcttactgccccggggtcctttcctctgggtgttggggcacagggtgctatgggaggcccatttgcttccctctcggagctcagtttttgcttcatgggtcaaaatgtgggctggccaagtggttacaggaacagggtttcggtaagctatgttgtctttttttttttttttttttttttttttaatggtttgattttgtgctgtggtattttttttcccttagaataatttttaatggcaaaacaggccttacagcagttgcttttctttaccatttatttctttaagaagctttaaaatatttattgaaaagtgccatatctaatttctttagctttcgcctcaggcagtgcaggcatctttacttttcatcctcagaagaaacaaacgactaacaaatgtagcaaatttactgcaggaatagttaggtcatgatactacctgaacactaaaccccagcctctttgtttggttttagttcctctgggtggtttttcttttgtgtgctggcttgattcttgtgagaagttttgacctggccaagggagggttgagccatggttctggtgtgggactttgcggtcaagacacagtacagacaggtcaggcctgcgtgccttttctctgggtggcctccccgttaggcccaccgtacgctcagccactatagtgtccctgtggggccttgccatcagattgtgtgtcaggagatggtacctttttggtgtggctggggaggagtgtggtccatgccagttctttgggcttcaggccactcttcccctcatgctgtggtgtaaagtgcacccatcaggtggtatatctggttctgatggcaagaagaaggtgggggatctccttatagggcatgggtctaggagcacagatgggccttttgccccgggtaaatgcttgtctgtttgctgtcatgtgttctttgaggagtgagccatctcgagccctgctttgaatttactgggtcatagagcctctgcctgtgctcttttccataatgacttcatgtgacatgcacttttggtgggctcagataattggtttctttttgtttttgacctcaggctctgtggcagactggggaaaatggggcctggcatcattttccctgtcaatgggaggggctgttccatgcagggtgggaggggaccaagttagcagagagtagccaaggatccttgcttcttcctttctagtgtgctgtcatccaagcaggctcctggctgtagggatgggccttggggaagaatcttctttgaaagcatctatgataactgagaagtcatccctagttggagaaatccagtaatgagcagaaggaggaagcaagtgaggacagaggccattgtattacagtgtcacgcagagggccctcaatgatggggcattggggaaggctgtagacatagtcatcagaacatcctggcctggcataagctgggttttctcctgggaccattggtcctcagcaggagttctttgcatgagttgctcaggggcaagggctgcaagtgggctgtgcttaggagaaagtgacacctggcagtgagggaagatggtgagcattattagcctttgttgtccagcatggccttcttgtcctgtctgctctggagaggagcctgtgggaccagtcctgcctggggagggcatacccacacgtgccagctgattctgactctgaatacatcatgtccggacttgggggtgtttctgcagaaaaaggaggttgtttttcagccttgaacatcttcaggaggatagagactcttgctcacatattcttagcaaagggaagggtctctcatctccaggccacagagatagttcttccattgccctaagaggctaggctaaccctcttgacataacttagacagcaaagcacttcatcctgtagttgggctctgtcacctttctcttcagttggccacattctcgtttcctccatcctgctatgctttgtgtgctcgggctgtgtgtggggtttttccctggtggaaggaagcccagctgtgtattgaatgtccttcatgtgttgtgtgtggctcagaaagcctgtcacttggcccctgtgctctgagccgtgagggtggggaggtggctgttccattaaagtgggagtattggatggccctcttgaaactagaattttgccttttttagtatgcagtataaagtttccagcatctattggtaacacaaagatttgctggtttttaaaataatacagtaagcataagtatgtaagtttttagaattggtactagaagttggacagctagttattctcgagaactttatttcactagaaaaatatactaattggaaagcagtttccaggagttaactcagtttaattttcagtctcagttattttagcctgttgagtttttgatggcacacctttggagagatggccacgcctgattcccatttcaggggcatcagaccatacctttttaagaagctccgtgaatctagtcatctacccttcatcctgggcgaacagccaaaaagagaaggggacaaggtgtctttttctccttctcactggggtgacatgaattcttttagttaatggctgtttgcaaattctaaactaatgaaatacttagcagctaacatgttcaatctagtaatgatgagtttaaatctcaattgacagtaatgttttagataaacaggcccagtaattcagttgatgaactgtatatcttctcagtctagatttgtaaatgtttaatgaattcagggttataagcatagttctttaagtaagattccagatagttgatttgcaaccagcagtctacctatgaatgtatcccaaacctttagaagattggaaaagatttttgaaataatgatttagttttgtaggaaaaacacccccttgaaaattaattcggttgacccagtaacattttttaaaacaattggtggctccaaaaggcctgccaacaaagaaaagtccaaattatctagtgggacattttgaatgttttatgtttattttgggtccactgtaaactttggttcaaaaaagaatttgaatttaaagaatttaccattatttaaattattaccaagtttttacattttcatgatggtattttccaggtatgaatgaaacatgactttttgattgtggtacttcctgtatcccctgtagtgccaaaaccagtgatactttatttgctcctatggcagctcatagaggtaaccgaagtgatttttcctcagtaattgaaacacatattctctaaatgccaatgtgtggtgatgggccctgcactgccttcatttctctagggcagtgtctttggattgtctagggcctaggtaattctgagaactactgtaaaccaaccacagggcactaaagcaatgtacacaccactctttgtgtgtatggaaggggttatataaacctgggctatgctggacatctacagaagagtattacattcacttgcaaagtttacatttttgagctcacagttatgaaaaatatgacccacaagtttttcaggcaggtgaggatgggtcttcttgcaaatgcatgagttctgtcttgagtcctgggaacttctctgttggttgagtgtgggctcattccctgactctcctaatcatgtttgcgtcagaatgttagcattgtaaataaaagaataggttgtataatagatacacaacacttgaaactttactttaaaaaaatcgatagttctacatatatatttagttatatcacttgacagatttcttctacacagtgtggagattgttttataccacagattatttttataaagttagtgaatttgaatgattttgtaatcagagctaatgagctttacctttcaagagaaacgtacactggagcatgagtggtgtggaacttttacttagtgtttatatggattcttgtgatacactggcagactggagtcaatttgcgggtcttttttggccaaaactccacttgtggttgtgtaggacagtgatattcagctcagcttcttgtggattgggaggagagagggcctgcaatgtgttttacattggtgcttcctcctgagatttctgttgaacaaagggttctgaggtcaaaaattagtttgtaagcctttgccataggacatagtcatgtgagagtgtttgggggaacagaaattgtataggggtgcctattggggtgggatgggactcgaataagattcaggtacaaaaactttgaaatgagaatctggtggtttgagtaatccaccagactgaattatctaagatcacattatccaggttggggggcagaattacccagttaagtaattgttcagaaaagtggggagggtggcatgtggatgcagtgatccaattaaatggagagctgccaggcacattttgtcctctctggtcagtgagaatggttgggttggctcgctgcttcaatctgtggaatcagccaggagcccagtgaggaagctcagaaccccagtaacagcagagcatctttcagatagctccagagttttcctgcttttctgaggaagctcagcatcactgccacaatacggaaagtggtcttcattttagcctatttatttttaggcagagagtggatggttatttgtgtgggacttttggtggcgatatataatgaataattaagttaatttctggtatgcataatggccagtcctgaggcccagctgaagacctgtcccccagaccctgcccgctggcttcaggctgctgcttctagacagaggtgcactggacgggatagttttatcaagagaatccctaatgtgtcattttaaaccagctgtgctttttattcattctggttgagcgtataggtttacactttaccctttttatacttggaataaatttagttccagcagatctagtagcactccagaaaccaaccccatctgttccccataaaaagaacattttctctgctctccagccacgtgtcttggaatgtaattctgttgtgcctttgtttttatcactctcttcgccccaaaagcaactgctgtaagcttttttctacttgtcttttctagtccccaacctctacctttttcctttttcccagccctaatttctggatgcacttctgtgatccaggtattttaagaaccagttacctcagacctcatgttgaacagtgtcgccatctgggtcctcttgatactgcagacttttaacgtacacatgcaggaaccctgctgagcgtgggcacttgttttaaagcaaaactcttcccaaggactgaagaaagggcttctggcaagctcgtcatggcattgtggtgggatgggtctagagtgtcatctgaatggtgcttcctgtgttcctctttgaattctgccattttcagtattcttgtgtgtctgaataggcaaagcgatttaattggctggtcttgcacgcaaattagttccaaagataagctctttgtaacacatttccagtcgctaatgctcaaatgtagaacattcctttaaatggcaggataaaaaacccactatccaccatagtgcattttgggaagatgtctgtagcatatgttgctgtgaaattaggccttgtgggatatggctgtttgtcattttgatgtattttaaataaatatatatattttttaaagagccttttttaccagttcaaaaagtttaattaaccagcagtcaccgcatctgaatttttgtctctggggcatagatggcagaccaagattaaaagtggtaactcagctatacgagcatgggctaccttcctgggctctcctgcagtcctgtagacctgctgttccgcagaccatgggacacaaggtcagtgtgttcccagtgagggtcccaagtcagtcatcttaagtgtttgttctctgccccattcagtggactgttgacttcagtccctgcaagtgctttagcccgagtggggttttctcagagcactgccacgagttaagtgtgtgtttagccaaataatttctccgtaagggaaaaatgcagtcacccaaattttaccaacaatgacagagatgagagtagaaaagattaggcaacatctgagttttaacttgaaaagtgtccaagtcatcatgaaaggccgactgggagcaagtgattattagagattcttcaggagacctcatctgaaaatgttaagactgccagtgagggaaggaattgttaaaatgccagcggcttttttttcctctttttttctgtaattctgtaaaaatgcagagaaagttgagtggtacttcagaattgagggagagggttaccgcagagtagaaatatatttctagatttcagttccacaccacaaatccacaacaatgccatttttcaactgtacaaaaatctgcttatgaactggacatgatcttaatggtagtgtcaaaggccaagtttttcacctgttaatatttttccacatttgtccttgaatctgaataactttatacagtactgtaaatttaacttacatcgagtttgttgtcaattcttatgaaaagagctttctgcatgtaacacatacggttaaagaacacagcaaaggacaaaatttgcaggaacagttttggaaccaacagaaaatgtcaccttttatttgccatcttatatatatctatcagttttaccagctacttctaaatttgtacattatttgtaagggaaagaaggaaaaccctaagacttgtctaacttagtggagaatgtgtgtgttgggcttaggatggatagctaagtcttattgagctgtgttacctaacttgtatataaaaattgtaattaaaagtttgggttcacctgtttctcacagtttaaaatgatgagtaattgcaaactctggaaatgtgactagtatatgatttaaggctgtagaagcaaggaagctctttcaagtgctaaaactaaagacttctagtttttggctcaaataagtactgtttgtataccaggatatgtgagatgtaaatgtagtaggtcacttttcacccttgtagctataaaataaaaattttgtagaacagaaatagcttgtactactgaattaacaaaagttatactaaagtatcatgtttaaaaaaaatatatatatatatacagagttaagcttgttgctgttaccctgtctggatttgaaaagtgtgctgatttatatatatatattacacacacacacacacacacacacacacacacacacacacacacacacacacacacacacacacacacacacatacacctaaaatggcctaaagcagacatccatgtaattacagttgcaaaatgaaaacattttggaaagaacattgtatcatagttcattcatttgcagtggatctttgttcctttttactgtggtaattttagaaatgagtgtcaagtttgaaattagatctgctaagttggggttttgctgcttgaactctgcactgggtcctcaaataaaccgatgtgaatgtagttttttccccctgtgtgaagaagcagttacaccccaacaataggaggaaaaatctagaactatttcaagttttatctttttgtatatgaaaataaaataataataaaacaa

SEQ ID NO: 16 - DNA, 1754 bp, Homo sapiens
tggagcagcggggcctggcacacagtaggcgttctataaatgtgtcacaagaatggcttccctcaggaaggcggcattaccgctgcctttctgcagaaaaggaaactaaggctcagcaagaaccaccgcccagccagagccaaggtcacagagcacgtccgtggcacgcgtccaggtcgtgccacagcagggccggcggcttcgacgcgggcagccgggtcccttttctttgacagatggggaaaccgaggcccggccggctgccggggctcctcgcacctaccccagcaactcaaattcaccacctcggactcctgcgaccgcatcaaagacgaatttcagctactgcaagctcagtaccacagcctcaagctcgaatgtgacaagttggccagtgagaagtcagagatgcagcgtcactatgtgatgtactacgagatgtcctacggcttgaacatcgagatgcacaaacaggctgagatcgtcaaaaggctgaacgggatttgtgcccaggtcctgccctacctctcccaagagcaccagcagcaggtcttgggagccattgagagggccaagcaggtcaccgctcccgagctgaactctatcatccgacagcagctccaagcccaccagctgtcccagctgcaggccctggccctgcccttgaccccactacccgtggggctgcagccgccttcgctgccggcggtcagcgcaggcaccggcctcctctcgctgtccgcgctgggttcccaggcccacctctccaaggaagacaagaacgggcacgatggtgacacccaccaggaggatgatggcgagaagtcggattagcagggggccgggacagggaggttgggaggggggacagaggggagacagaggcacggagagaaaggaatgtttagcacaagacacagcggagctcgggattggctaaactcccatagtatttatggtggccgccggcgggggccccagcccagcttgcaggccacctctagctttcttcctaccccattcccggcttccctcctcctcccctgcagcctggttaggtggatacctgccctgacatgtgaggcaagctaaggcctggagggtcagatgggagaccaggtcccaagggagcaagacctcgcgaagcgcagcagccccggcccttcccccgttttgaacatgtgtaaccgacagtctgcctgggccacagccctctcaccctggtactgcatgcacgcaatgctagctgcccctttcccgtcctgggcaccccgagtctcccccgaccccgggtcccaggtatgctcccacctccacctgccccactcaccacctctgctagttccagacacctccacgcccacctggtcctctcccatcgcccacaaaagggggggcacgagggacgagcttagctgagctgggaggagcagggtgagggtgggcgacccaggattccccctccccttcccaaataaagatgagggtactaaagttgtcttggtttttattttattattatttttttctttttccagtatactagcttgtcttttaagaaaggggatattaaaaaaaaaaaaagacaaaagtgtttttaaaaaaaagcaacacccacacctgtgtctgtatatagtcagcttatctcgtgttcaatcgtctgatctctacagagagaagtggaaaatgctgtatcaagggtgggcttagctgtgcctttccaataaagatgtgagaagcttcaaaaaaaaaaa

SEQ ID NO: 17 - DNA, 2878 bp, Homo sapiens
cggcaggaccgagcgcggcaggcggctggcccagcgcagccagcgcggcccgaaggacgggagcaggcggccgagcaccgagcgctgggcaccgggcaccgagcggcggcggcacgcgaggcccggccccgagcagcgcccccgcccgccgcggcctccagcccggccccgcccagcgccggcccgcggggatgcggagcggcgggcgccggaggccgcggcccggctaggcccgcgctcgcgcccggacgcggcggcccggggcttagggaaggccgagccagcctgggtcaaagaagtcaaaggggctgcctggaggaggcagcctgtcagctggtgcatcagaggctgtggccaggccagctgggctcggggagcgccagcctgagaggagcgcgtgagcgtcgcgggagcctcgggcaccatgagcgacgtggctattgtgaaggagggttggctgcacaaacgaggggagtacatcaagacctggcggccacgctacttcctcctcaagaatgatggcaccttcattggctacaaggagcggccgcaggatgtggaccaacgtgaggctcccctcaacaacttctctgtggcgcagtgccagctgatgaagacggagcggccccggcccaacaccttcatcatccgctgcctgcagtggaccactgtcatcgaacgcaccttccatgtggagactcctgaggagcgggaggagtggacaaccgccatccagactgtggctgacggcctcaagaagcaggaggaggaggagatggacttccggtcgggctcacccagtgacaactcaggggctgaagagatggaggtgtccctggccaagcccaagcaccgcgtgaccatgaacgagtttgagtacctgaagctgctgggcaagggcactttcggcaaggtgatcctggtgaaggagaaggccacaggccgctactacgccatgaagatcctcaagaaggaagtcatcgtggccaaggacgaggtggcccacacactcaccgagaaccgcgtcctgcagaactccaggcaccccttcctcacagccctgaagtactctttccagacccacgaccgcctctgctttgtcatggagtacgccaacgggggcgagctgttcttccacctgtcccgggagcgtgtgttctccgaggaccgggcccgcttctatggcgctgagattgtgtcagccctggactacctgcactcggagaagaacgtggtgtaccgggacctcaagctggagaacctcatgctggacaaggacgggcacattaagatcacagacttcgggctgtgcaaggaggggatcaaggacggtgccaccatgaagaccttttgcggcacacctgagtacctggcccccgaggtgctggaggacaatgactacggccgtgcagtggactggtgggggctgggcgtggtcatgtacgagatgatgtgcggtcgcctgcccttctacaaccaggaccatgagaagctttttgagctcatcctcatggaggagatccgcttcccgcgcacgcttggtcccgaggccaagtccttgctttcagggctgctcaagaaggaccccaagcagaggcttggcgggggctccgaggacgccaaggagatcatgcagcatcgcttctttgccggtatcgtgtggcagcacgtgtacgagaagaagctcagcccacccttcaagccccaggtcacgtcggagactgacaccaggtattttgatgaggagttcacggcccagatgatcaccatcacaccacctgaccaagatgacagcatggagtgtgtggacagcgagcgcaggccccacttcccccagttctcctactcggccagcggcacggcctgaggcggcggtggactgcgctggacgatagcttggagggatggagaggcggcctcgtgccatgatctgtatttaatggtttttatttctcgggtgcatttgagagaagccacgctgtcctctcgagcccagatggaaagacgtttttgtgctgtgggcagcaccctcccccgcagcggggtagggaagaaaactatcctgcgggttttaatttatttcatccagtttgttctccgggtgtggcctcagccctcagaacaatccgattcacgtagggaaatgttaaggacttctgcagctatgcgcaatgtggcattggggggccgggcaggtcctgcccatgtgtcccctcactctgtcagccagccgccctgggctgtctgtcaccagctatctgtcatctctctggggccctgggcctcagttcaacctggtggcaccagatgcaacctcactatggtatgctggccagcaccctctcctgggggtggcaggcacacagcagccccccagcactaaggccgtgtctctgaggacgtcatcggaggctgggcccctgggatgggaccagggatgggggatgggccagggtttacccagtgggacagaggagcaaggtttaaatttgttattgtgtattatgttgttcaaatgcattttgggggtttttaatctttgtgacaggaaagccctcccccttccccttctgtgtcacagttcttggtgactgtcccaccgggagcctccccctcagatgatctctccacggtagcacttgaccttttcgacgcttaacctttccgctgtcgccccaggccctccctgactccctgtgggggtggccatccctgggcccctccacgcctcctggccagacgctgccgctgccgctgcaccacggcgtttttttacaacattcaactttagtatttttactattataatataatatggaaccttccctccaaattcttcaataaaagttgcttttcaaaaaaaaaaaaaaaaaaaaaa

SEQ ID NO: 18 - DNA, 5263 bp, Homo sapiens
cggggggggccgcgccgtgctagccgttgggcctgcctcggaggaggcgtcgccgccgccgctgccgctgccggcgccgttgccgctgccgggaaacacaaggaaagggaaccagcgcagcgtggcgatgggcgggggtagagccccgccggagaggctgggcggctgccggtgacagactgtgccctgtccacggtgcctcctgcatgtcctgctgccctgagctgtcccgagctaggtgacagcgtaccacgctgccaccatgaatgaggtgtctgtcatcaaagaaggctggctccacaagcgtggtgaatacatcaagacctggaggccacggtacttcctgctgaagagcgacggctccttcattgggtacaaggagaggcccgaggcccctgatcagactctaccccccttaaacaacttctccgtagcagaatgccagctgatgaagaccgagaggccgcgacccaacacctttgtcatacgctgcctgcagtggaccacagtcatcgagaggaccttccacgtggattctccagacgagagggaggagtggatgcgggccatccagatggtcgccaacagcctcaagcagcgggccccaggcgaggaccccatggactacaagtgtggctcccccagtgactcctccacgactgaggagatggaagtggcggtcagcaaggcacgggctaaagtgaccatgaatgacttcgactatctcaaactccttggcaagggaacctttggcaaagtcatcctggtgcgggagaaggccactggccgctactacgccatgaagatcctgcggaaggaagtcatcattgccaaggatgaagtcgctcacacagtcaccgagagccgggtcctccagaacaccaggcacccgttcctcactgcgctgaagtatgccttccagacccacgaccgcctgtgctttgtgatggagtatgccaacgggggtgagctgttcttccacctgtcccgggagcgtgtcttcacagaggagcgggcccggttttatggtgcagagattgtctcggctcttgagtacttgcactcgcgggacgtggtataccgcgacatcaagctggaaaacctcatgctggacaaagatggccacatcaagatcactgactttggcctctgcaaagagggcatcagtgacggggccaccatgaaaaccttctgtgggaccccggagtacctggcgcctgaggtgctggaggacaatgactatggccgggccgtggactggtgggggctgggtgtggtcatgtacgagatgatgtgcggccgcctgcccttctacaaccaggaccacgagcgcctcttcgagctcatcctcatggaagagatccgcttcccgcgcacgctcagccccgaggccaagtccctgcttgctgggctgcttaagaaggaccccaagcagaggcttggtggggggcccagcgatgccaaggaggtcatggagcacaggttcttcctcagcatcaactggcaggacgtggtccagaagaagctcctgccacccttcaaacctcaggtcacgtccgaggtcgacacaaggtacttcgatgatgaatttaccgcccagtccatcacaatcacaccccctgaccgctatgacagcctgggcttactggagctggaccagcggacccacttcccccagttctcctactcggccagcatccgcgagtgagcagtctgcccacgcagaggacgcacgctcgctgccatcaccgctgggtggttttttccccctaactttttacttagcctttttggtttgtgtccccacccccacctcctcaccccctttccagttcttcttcaggcccctcccagacgcaccccagcggcccctgcagcccctgcctccagcctccagcctcacctttgtgcccagactcgcatttggaagactccacctcccgcccaggcctgggctgttgggcggttggagattcaggttttaatccacacaagccccagtgaggggtgaagcatggcgcctggggcctgcctgagtttctggcctgggtgtcgtgctggtgtctgcctccgcgctgctgcatctggacgaaggctgccttctggtgggacgcgacacccggcagacagtggtgctgccttccaggccccgtggcctaggctcggagtggccaggcacggggcggtccaatcccccacccgctgtccccctatgggggcagaaaagcaataatgtccaggggcaggcaggggcccttgggagctgcagggctgggggttagggctgctccctggtgaatggagtcagatcctaggatctgtaccatggggaaccaggagtggccgggctgggtgccgcctcctggtccggcctcctccccaccaaactgtcctcaccctatggatgaggcaggaggaacatttggggccaaacctgcctgcctcccagccccgtgccttactagggcttccttccagctggccttacctcccgctggaccctgggcctggcctggccccactgggggctatgggctgggctcaccctctcctctgcgggggtggagggccaccagccttggctgttacaatcttacaccggacagtattgggccccatggacttggtcagggaggggtgggggtgggcatctctggtacctattggggtggggggcctctgaaaagggaggctcctaggcccccctcacccctccctctccccagggccccacgttctgcagccttaaggttgaacatgagtgcacgtccatgtcagtgctgtgggactcctgtgcgtgcctcggactgcgtgtgtcggcgggacgcaggcacacgtgggtgtgtgtgcatgtgtgtttgtgtgagggcagcgtgtcctccagtgtgcatggtgtgtgggcttgggccccatccctggcccgagcatttcatcctgtgggggaggggtgctgacctagtgggaggagccccactgtgatccatgagctgccctgcccacgcctcccctccctgtagcaacacctctgggtgtttggagtttagcttttgtgggtttgctctccctatcccatctcctgtactacacagttcatggcagggtggggaggggtggggttggttcgggtgggtgagggtctttttcctctgtgtgcgatgttgttatctgacagttctccgtccctactggcctttctcctcgtcttcatatttgtacggtacaagcaataaagacactcatttcagaccagggcccagcctgcactcacgccagcccaaccactctgggctttgccttggtgatggagtcagacccctgggccccagctcctcctgtactagccgttcccttcagcaaggagggcactgagctcagggtgagggcagctggggtgtgtgcaggagctcaggctggagagggtgggtggagctggtgctgtggggctgaggggtatgggaaggctccccgcatgtgggggtggggtggacagagaccactccaggccctcagtgctgcttaggctaagagaggtggggtggagggacagggctggaagatctgggtagcccagaatgaggagggtgcctgtgctgtcactgaatgagagggagtggttcattccacccggctgccgagcctcagaggggggcattcctatcctgccccacctccctgtttatgctgccacctggaagccttgaggcccccaaattccagtacagacccagtggtgtgttcatggtggcgtggttgctgtcacctgggagctcctgagcgtttggttagaaccctgttcagcttggggtcagccctcccctagtcactgccctttagcctggatgtgtctgggcccctgcacttcccgtgcttgagtcacgtggctgcatggccgggcgctggccggatggaacacctcccccagcaagggaccagggaccagagccctggcctgccctgctgagccctgctgtgcagagggcctggcacagatgaatttgagattttgccgcaaggtgttagcacttcacacccattgagtctttgagattttaagtgaatgtaagcagaaaaagtcagatccaatttacagaaatcagagttagctacagctaggactcgtttggttggggttttttagtttgtctttctaaagtcatgtggaccttaatttaattacaaaagtctaccctggtggtcataaaataggcaggcctatgaagaaaggccttttactcttccatctcatcccagccccgagttgacccacgttgctgctcctcacaccatggtgatgcaggtctcgtagtgtgggcacaggcctggctacctcatctttttagtgcctctctcctcttccacaggatggggtcccacagctgcagcagctggccccgtagttgagcatgtgtggttatcctgtagagcttttcccaagaagggtgtttgaacttagagtcttaataaaatcttaccaaataaattttgagtagaataatcgtcttttgcaatgtacattttaaaaatttcacacattcttttttgtatataaagaacagtgactgggcacagtggctcatgcctgtaatcccagcaatttgggaggccgaggcgggcgggtctcttgaggccaggggttcgagaccagcctgggcatcatagggagaccttcatctctacaaaaaatacaaaaattagctgggcatggtggtgcatgcctgcaatcccagctaacttggaaggctgaggtgaggtgggaagatcacttgagcccaggagtttgaggctgcagtgagctatgattgcggcactgcactgcagcctgggacaatgagactgtgtctctaaaaataaaaaaaaaaaaaacatgatacatgctattaaaaaagacagcaaagcaggagtataagaaaggaaattcacccgaggtcgcagggccttgagtactcattttggtgctgattacctctctgcaaatggacacggcatcataaattggtagtttcctgctctttttgtgtaatcttttccagttaatgtgaagcctctgggggctgccctcgtgcactgatggttgtgtggagtcgggggcggcagtgcgattcccttttagctgctgcatggggggaactcaggctttccagctgcttcctggggttccatggggtagacccctcaaccgcttcagctgccccgttaacaggaattgacttggtttcgtttggtgctaccagcagtcctgtaataaactagctatccatctgta

SEQ ID NO: 19 - DNA, 1703 bp, Homo sapiens
gcagcagcagagaatccaaaccctaaagctgatatcacaaagtaccatttctccaagttgggggctcagaggggagtcatcatgagcgatgttaccattgtgaaagaaggttgggttcagaagaggggagaatatataaaaaactggaggccaagatacttccttttgaagacagatggctcattcataggatataaagagaaacctcaagatgtggatttaccttatcccctcaacaacttttcagtggcaaaatgccagttaatgaaaacagaacgaccaaagccaaacacatttataatcagatgtctccagtggactactgttatagagagaacatttcatgtagatactccagaggaaagggaagaatggacagaagctatccaggctgtagcagacagactgcagaggcaagaagaggagagaatgaattgtagtccaacttcacaaattgataatataggagaggaagagatggatgcctctacaacccatcataaaagaaagacaatgaatgattttgactatttgaaactactaggtaaaggcacttttgggaaagttattttggttcgagagaaggcaagtggaaaatactatgctatgaagattctgaagaaagaagtcattattgcaaaggatgaagtggcacacactctaactgaaagcagagtattaaagaacactagacatccctttttaacatccttgaaatattccttccagacaaaagaccgtttgtgttttgtgatggaatatgttaatgggggcgagctgtttttccatttgtcgagagagcgggtgttctctgaggaccgcacacgtttctatggtgcagaaattgtctctgccttggactatctacattccggaaagattgtgtaccgtgatctcaagttggagaatctaatgctggacaaagatggccacataaaaattacagattttggactttgcaaagaagggatcacagatgcagccaccatgaagacattctgtggcactccagaatatctggcaccagaggtgttagaagataatgactatggccgagcagtagactggtggggcctaggggttgtcatgtatgaaatgatgtgtgggaggttacctttctacaaccaggaccatgagaaactttttgaattaatattaatggaagacattaaatttcctcgaacactctcttcagatgcaaaatcattgctttcagggctcttgataaaggatccaaataaacgccttggtggaggaccagatgatgcaaaagaaattatgagacacagtttcttctctggagtaaactggcaagatgtatatgataaaaagcttgtacctccttttaaacctcaagtaacatctgagacagatactagatattttgatgaagaatttacagctcagactattacaataacaccacctgaaaaatgtcagcaatcagattgtggcatgctgggtaactggaaaaaataataaaaatcggcttcctacagccagcagcacagtcacccatggaactgttggctttggattaaatgtggaattgaacgactacccagaagtgttctggaaagaagcgagatgtgtggcctgcctcaccgtcctcacccatcaaaagcaccagcaggcacgttaactcgaattctcacaaggaaaaggccattaaagctcaaggtgcatttcaaactccaggctac

SEQ ID NO: 20 - DNA, 10719 bp, Homo sapiens
tggagacagaatggaggtgctgccggactcggaaatggggtccaagggtagccaaggatggctgcagcttcatatgatcagttgttaaagcaagttgaggcactgaagatggagaactcaaatcttcgacaagagctagaagataattccaatcatcttacaaaactggaaactgaggcatctaatatgaaggaagtacttaaacaactacaaggaagtattgaagatgaagctatggcttcttctggacagattgatttattagagcgtcttaaagagcttaacttagatagcagtaatttccctggagtaaaactgcggtcaaaaatgtccctccgttcttatggaagccgggaaggatctgtatcaagccgttctggagagtgcagtcctgttcctatgggttcatttccaagaagagggtttgtaaatggaagcagagaaagtactggatatttagaagaacttgagaaagagaggtcattgcttcttgctgatcttgacaaagaagaaaaggaaaaagactggtattacgctcaacttcagaatctcactaaaagaatagatagtcttcctttaactgaaaatttttccttacaaacagatatgaccagaaggcaattggaatatgaagcaaggcaaatcagagttgcgatggaagaacaactaggtacctgccaggatatggaaaaacgagcacagcgaagaatagccagaattcagcaaatcgaaaaggacatacttcgtatacgacagcttttacagtcccaagcaacagaagcagagaggtcatctcagaacaagcatgaaaccggctcacatgatgctgagcggcagaatgaaggtcaaggagtgggagaaatcaacatggcaacttctggtaatggtcagggttcaactacacgaatggaccatgaaacagccagtgttttgagttctagtagcacacactctgcacctcgaaggctgacaagtcatctgggaaccaaggtggaaatggtgtattcattgttgtcaatgcttggtactcatgataaggatgatatgtcgcgaactttgctagctatgtctagctcccaagacagctgtatatccatgcgacagtctggatgtcttcctctcctcatccagcttttacatggcaatgacaaagactctgtattgttgggaaattcccggggcagtaaagaggctcgggccagggccagtgcagcactccacaacatcattcactcacagcctgatgacaagagaggcaggcgtgaaatccgagtccttcatcttttggaacagatacgcgcttactgtgaaacctgttgggagtggcaggaagctcatgaaccaggcatggaccaggacaaaaatccaatgccagctcctgttgaacatcagatctgtcctgctgtgtgtgttctaatgaaactttcatttgatgaagagcatagacatgcaatgaatgaactagggggactacaggccattgcagaattattgcaagtggactgtgaaatgtatgggcttactaatgaccactacagtattacactaagacgatatgctggaatggctttgacaaacttgacttttggagatgtagccaacaaggctacgctatgctctatgaaaggctgcatgagagcacttgtggcccaactaaaatctgaaagtgaagacttacagcaggttattgcgagtgttttgaggaatttgtcttggcgagcagatgtaaatagtaaaaagacgttgcgagaagttggaagtgtgaaagcattgatggaatgtgctttagaagttaaaaaggaatcaaccctcaaaagcgtattgagtgccttatggaatttgtcagcacattgcactgagaataaagctgatatatgtgctgtagatggtgcacttgcatttttggttggcactcttacttaccggagccagacaaacactttagccattattgaaagtggaggtgggatattacggaatgtgtccagcttgatagctacaaatgaggaccacaggcaaatcctaagagagaacaactgtctacaaactttattacaacacttaaaatctcatagtttgacaatagtcagtaatgcatgtggaactttgtggaatctctcagcaagaaatcctaaagaccaggaagcattatgggacatgggggcagttagcatgctcaagaacctcattcattcaaagcacaaaatgattgctatgggaagtgctgcagctttaaggaatctcatggcaaataggcctgcgaagtacaaggatgccaatattatgtctcctggctcaagcttgccatctcttcatgttaggaaacaaaaagccctagaagcagaattagatgctcagcacttatcagaaacttttgacaatatagacaatttaagtcccaaggcatctcatcgtagtaagcagagacacaagcaaagtctctatggtgattatgtttttgacaccaatcgacatgatgataataggtcagacaattttaatactggcaacatgactgtcctttcaccatatttgaatactacagtgttacccagctcctcttcatcaagaggaagcttagatagttctcgttctgaaaaagatagaagtttggagagagaacgcggaattggtctaggcaactaccatccagcaacagaaaatccaggaacttcttcaaagcgaggtttgcagatctccaccactgcagcccagattgccaaagtcatggaagaagtgtcagccattcatacctctcaggaagacagaagttctgggtctaccactgaattacattgtgtgacagatgagagaaatgcacttagaagaagctctgctgcccatacacattcaaacacttacaatttcactaagtcggaaaattcaaataggacatgttctatgccttatgccaaattagaatacaagagatcttcaaatgatagtttaaatagtgtcagtagtagtgatggttatggtaaaagaggtcaaatgaaaccctcgattgaatcctattctgaagatgatgaaagtaagttttgcagttatggtcaatacccagccgacctagcccataaaatacatagtgcaaatcatatggatgataatgatggagaactagatacaccaataaattatagtcttaaatattcagatgagcagttgaactctggaaggcaaagtccttcacagaatgaaagatgggcaagacccaaacacataatagaagatgaaataaaacaaagtgagcaaagacaatcaaggaatcaaagtacaacttatcctgtttatactgagagcactgatgataaacacctcaagttccaaccacattttggacagcaggaatgtgtttctccatacaggtcacggggagccaatggttcagaaacaaatcgagtgggttctaatcatggaattaatcaaaatgtaagccagtctttgtgtcaagaagatgactatgaagatgataagcctaccaattatagtgaacgttactctgaagaagaacagcatgaagaagaagagagaccaacaaattatagcataaaatataatgaagagaaacgtcatgtggatcagcctattgattatagtttaaaatatgccacagatattccttcatcacagaaacagtcattttcattctcaaagagttcatctggacaaagcagtaaaaccgaacatatgtcttcaagcagtgagaatacgtccacaccttcatctaatgccaagaggcagaatcagctccatccaagttctgcacagagtagaagtggtcagcctcaaaaggctgccacttgcaaagtttcttctattaaccaagaaacaatacagacttattgtgtagaagatactccaatatgtttttcaagatgtagttcattatcatctttgtcatcagctgaagatgaaataggatgtaatcagacgacacaggaagcagattctgctaataccctgcaaatagcagaaataaaagaaaagattggaactaggtcagctgaagatcctgtgagcgaagttccagcagtgtcacagcaccctagaaccaaatccagcagactgcagggttctagtttatcttcagaatcagccaggcacaaagctgttgaattttcttcaggagcgaaatctccctccaaaagtggtgctcagacacccaaaagtccacctgaacactatgttcaggagaccccactcatgtttagcagatgtacttctgtcagttcacttgatagttttgagagtcgttcgattgccagctccgttcagagtgaaccatgcagtggaatggtaagtggcattataagccccagtgatcttccagatagccctggacaaaccatgccaccaagcagaagtaaaacacctccaccacctcctcaaacagctcaaaccaagcgagaagtacctaaaaataaagcacctactgctgaaaagagagagagtggacctaagcaagctgcagtaaatgctgcagttcagagggtccaggttcttccagatgctgatactttattacattttgccacggaaagtactccagatggattttcttgttcatccagcctgagtgctctgagcctcgatgagccatttatacagaaagatgtggaattaagaataatgcctccagttcaggaaaatgacaatgggaatgaaacagaatcagagcagcctaaagaatcaaatgaaaaccaagagaaagaggcagaaaaaactattgattctgaaaaggacctattagatgattcagatgatgatgatattgaaatactagaagaatgtattatttctgccatgccaacaaagtcatcacgtaaagcaaaaaagccagcccagactgcttcaaaattacctccacctgtggcaaggaaaccaagtcagctgcctgtgtacaaacttctaccatcacaaaacaggttgcaaccccaaaagcatgttagttttacaccgggggatgatatgccacgggtgtattgtgttgaagggacacctataaacttttccacagctacatctctaagtgatctaacaatcgaatcccctccaaatgagttagctgctggagaaggagttagaggaggggcacagtcaggtgaatttgaaaaacgagataccattcctacagaaggcagaagtacagatgaggctcaaggaggaaaaacctcatctgtaaccatacctgaattggatgacaataaagcagaggaaggtgatattcttgcagaatgcattaattctgctatgcccaaagggaaaagtcacaagcctttccgtgtgaaaaagataatggaccaggtccagcaagcatctgcgtcttcttctgcacccaacaaaaatcagttagatggtaagaaaaagaaaccaacttcaccagtaaaacctataccacaaaatactgaatataggacacgtgtaagaaaaaatgcagactcaaaaaataatttaaatgctgagagagttttctcagacaacaaagattcaaagaaacagaatttgaaaaataattccaaggtcttcaatgataagctcccaaataatgaagatagagtcagaggaagttttgcttttgattcacctcatcattacacgcctattgaaggaactccttactgtttttcacgaaatgattctttgagttctctagattttgatgatgatgatgttgacctttccagggaaaaggctgaattaagaaaggcaaaagaaaataaggaatcagaggctaaagttaccagccacacagaactaacctccaaccaacaatcagctaataagacacaagctattgcaaagcagccaataaatcgaggtcagcctaaacccatacttcagaaacaatccacttttccccagtcatccaaagacataccagacagaggggcagcaactgatgaaaagttacagaattttgctattgaaaatactccggtttgcttttctcataattcctctctgagttctctcagtgacattgaccaagaaaacaacaataaagaaaatgaacctatcaaagagactgagccccctgactcacagggagaaccaagtaaacctcaagcatcaggctatgctcctaaatcatttcatgttgaagataccccagtttgtttctcaagaaacagttctctcagttctcttagtattgactctgaagatgacctgttgcaggaatgtataagctccgcaatgccaaaaaagaaaaagccttcaagactcaagggtgataatgaaaaacatagtcccagaaatatgggtggcatattaggtgaagatctgacacttgatttgaaagatatacagagaccagattcagaacatggtctatcccctgattcagaaaattttgattggaaagctattcaggaaggtgcaaattccatagtaagtagtttacatcaagctgctgctgctgcatgtttatctagacaagcttcgtctgattcagattccatcctttccctgaaatcaggaatctctctgggatcaccatttcatcttacacctgatcaagaagaaaaaccctttacaagtaataaaggcccacgaattctaaaaccaggggagaaaagtacattggaaactaaaaagatagaatctgaaagtaaaggaatcaaaggaggaaaaaaagtttataaaagtttgattactggaaaagttcgatctaattcagaaatttcaggccaaatgaaacagccccttcaagcaaacatgccttcaatctctcgaggcaggacaatgattcatattccaggagttcgaaatagctcctcaagtacaagtcctgtttctaaaaaaggcccaccccttaagactccagcctccaaaagccctagtgaaggtcaaacagccaccacttctcctagaggagccaagccatctgtgaaatcagaattaagccctgttgccaggcagacatcccaaataggtgggtcaagtaaagcaccttctagatcaggatctagagattcgaccccttcaagacctgcccagcaaccattaagtagacctatacagtctcctggccgaaactcaatttcccctggtagaaatggaataagtcctcctaacaaattatctcaacttccaaggacatcatcccctagtactgcttcaactaagtcctcaggttctggaaaaatgtcatatacatctccaggtagacagatgagccaacagaaccttaccaaacaaacaggtttatccaagaatgccagtagtattccaagaagtgagtctgcctccaaaggactaaatcagatgaataatggtaatggagccaataaaaaggtagaactttctagaatgtcttcaactaaatcaagtggaagtgaatctgatagatcagaaagacctgtattagtacgccagtcaactttcatcaaagaagctccaagcccaaccttaagaagaaaattggaggaatctgcttcatttgaatctctttctccatcatctagaccagcttctcccactaggtcccaggcacaaactccagttttaagtccttcccttcctgatatgtctctatccacacattcgtctgttcaggctggtggatggcgaaaactcccacctaatctcagtcccactatagagtataatgatggaagaccagcaaagcgccatgatattgcacggtctcattctgaaagtccttctagacttccaatcaataggtcaggaacctggaaacgtgagcacagcaaacattcatcatcccttcctcgagtaagcacttggagaagaactggaagttcatcttcaattctttctgcttcatcagaatccagtgaaaaagcaaaaagtgaggatgaaaaacatgtgaactctatttcaggaaccaaacaaagtaaagaaaaccaagtatccgcaaaaggaacatggagaaaaataaaagaaaatgaattttctcccacaaatagtacttctcagaccgtttcctcaggtgctacaaatggtgctgaatcaaagactctaatttatcaaatggcacctgctgtttctaaaacagaggatgtttgggtgagaattgaggactgtcccattaacaatcctagatctggaagatctcccacaggtaatactcccccggtgattgacagtgtttcagaaaaggcaaatccaaacattaaagattcaaaagataatcaggcaaaacaaaatgtgggtaatggcagtgttcccatgcgtaccgtgggtttggaaaatcgcctgaactcctttattcaggtggatgcccctgaccaaaaaggaactgagataaaaccaggacaaaataatcctgtccctgtatcagagactaatgaaagttctatagtggaacgtaccccattcagttctagcagctcaagcaaacacagttcacctagtgggactgttgctgccagagtgactccttttaattacaacccaagccctaggaaaagcagcgcagatagcacttcagctcggccatctcagatcccaactccagtgaataacaacacaaagaagcgagattccaaaactgacagcacagaatccagtggaacccaaagtcctaagcgccattctgggtcttaccttgtgacatctgtttaaaagagaggaagaatgaaactaagaaaattctatgttaattacaactgctatatagacattttgtttcaaatgaaactttaaaagactgaaaaattttgtaaataggtttgattcttgttagagggtttttgttctggaagccatatttgatagtatactttgtcttcactggtcttattttgggaggcactcttgatggttaggaaaaaaatagtaaagccaagtatgtttgtacagtatgttttacatgtatttaaagtagcatcccatcccaacttcctttaattattgcttgtcttaaaataatgaacactacagatagaaaatatgatatattgctgttatcaatcatttctagattataaactgactaaacttacatcagggaaaaattggtatttatgcaaaaaaaaatgtttttgtccttgtgagtccatctaacatcataattaatcatgtggctgtgaaattcacagtaatatggttcccgatgaacaagtttacccagcctgctttgctttactgcatgaatgaaactgatggttcaatttcagaagtaatgattaacagttatgtggtcacatgatgtgcatagagatagctacagtgtaataatttacactattttgtgctccaaacaaaacaaaaatctgtgtaactgtaaaacattgaatgaaactattttacctgaactagattttatctgaaagtaggtagaatttttgctatgctgtaatttgttgtatattctggtatttgaggtgagatggctgctcttttattaatgagacatgaattgtgtctcaacagaaactaaatgaacatttcagaataaattattgctgtatgtaaactgttactgaaattggtatttgtttgaagggtcttgtttcacatttgtattaataattgtttaaaatgcctcttttaaaagcttatataaatttttttcttcagcttctatgcattaagagtaaaattcctcttactgtaataaaaacaattgaagaagactgttgccacttaaccattccatgcgttggcacttatctattcctgaaatttcttttatgtgattagctcatcttgatttttaatatttttccacttaaacttttttttcttactccactggagctcagtaaaagtaaattcatgtaatagcaatgcaagcagcctagcacagactaagcattgagcataataggcccacataatttcctctttcttaatattatagaattctgtacttgaaattgattcttagacattgcagtctcttcgaggctttacagtgtaaactgtcttgccccttcatcttcttgttgcaactgggtctgacatgaacactttttatcaccctgtatgttagggcaagatctcagcagtgaagtataatcagcactttgccatgctcagaaaattcaaatcacatggaactttagaggtagatttaatacgattaagatattcagaagtatattttagaatccctgcctgttaaggaaactttatttgtggtaggtacagttctggggtacatgttaagtgtccccttatacagtggagggaagtcttccttcctgaaggaaaataaactgacacttattaactaagataatttacttaatatatcttccctgatttgttttaaaagatcagagggtgactgatgatacatgcatacatatttgttgaataaatgaaaatttatttttagtgataagattcatacactctgtatttggggagggaaaacctttttaagcatggtggggcactcagataggagtgaatacacctacctggtgccttgaaaatcacatcaagtagttaattatctaccccttacctgtgtttataacttccaggtaatgagaatgattttttttaaagctaaaatgccagtaaataaaagtgctatgacttgagctaagatatttgactccaatgcctgtactgtgtctactgcaccactttgtaaacacttcaatttactatctttgaaatgattgacctttaaatttttgccaaatgttatctgaaattgtctatgaataccatctacttctgttgttttcccaggcttccataaacaatggagatacatgcaaaaaaaaaaaaaaaaaa

SEQ ID NO: 21 - DNA, 10151 bp, Homo sapiens
gcagcgccgcctgcccaggcccggaccgggctttgtccgccccggagcccctgcccgcgccgcggagaccccggagcccgcgcgctccgaggccaccccgggccgggatttccggtggggcccgcggagccgcgcagagggaggaggccccagacccaggcgccccgccagcccagctgcacgtaagcggacgctgcaggagctgaagatggcgagctccgtggcgccctacgagcagctggtgaggcaggtggaggccttgaaggctgagaacagccacctgaggcaggagctaagggacaactccagccacctgtccaagctggagacagagacgtcgggcatgaaggaggtcctgaagcacctacagggaaaactggagcaggaggcccgagtgctggtgtcctcggggcagacggaggtgctggagcagctgaaggccctacagatggacatcaccagcctgtacaacctcaagttccagccgcccaccctgggcccggagcctgccgcccggacccccgagggcagcccagtacacggctccgggccctccaaggacagctttggggagctgagccgggccaccatccggctgctggaggaactggaccgggaacggtgtttcctgctgaatgagattgagaaggaggagaaggagaagctctggtactactctcagctgcagggcctgtccaagcgcctggacgagctgccgcacgtggagacgcagttctcgatgcagatggacctgatccggcagcagcttgagttcgaggcccagcacatccgctcgctgatggaggagcgcttcggcacctcggacgagatggtgcagcgggcacagatccgcgcctcgcgcctggagcagattgacaaggagctgctggaggcgcaggaccgagtgcagcagacggagccccaggccttgctggcggtgaagtcggtgccggtggacgaggaccccgagacagaggtccccacacaccctgaggatggcacccctcagccgggcaacagcaaggtggaggtggtcttctggctgttgtccatgttggcgacgcgcgaccaggaggatacagcgcgcacgctgctggccatgtccagctcgcccgagagctgcgtggccatgcgccgctcgggctgtctgcctctgctgctgcaaatcctccacggcaccgaggccgcggccgggggtcgcgccggggccccaggggcaccgggcgccaaggacgcacgcatgcgcgccaacgcggcgctgcacaacatcgtcttctcgcagccggaccagggcctggcgcgcaaggagatgcgcgtcctgcacgtgctggagcagatccgggcctactgcgagacctgctgggactggctgcaggcccgagacggcgggcccgagggaggtggcgccggcagcgccccgatccccatcgagccgcagatctgccaggccacctgtgctgttatgaagctgtcctttgatgaggagtaccgccgtgccatgaacgagctaggtgggctgcaggccgtggcagagctgctgcaggttgactatgagatgcacaagatgacccgggacccgctgaacctggcgctgcgccgctacgcgggcatgaccctcaccaacctcacctttggggacgttgccaacaaggccaccctgtgtgcgcgccgcggctgcatggaggccatcgtggcccagctggcctccgacagtgaggagctccaccaggtggtgtccagcatccttcggaacttgtcctggagggccgacatcaacagcaagaaggtgctgagggaggcgggcagcgtgactgccctggtgcagtgtgtcctgcgggccaccaaggagtccaccctgaagagcgtgctgagcgccctgtggaatctgtctgcacacagcacagagaacaaggcggccatctgccaggtggatggcgccctgggcttcctggtgagcaccctgacctacaagtgtcagagcaactcgctggccatcatcgagagcggcggcggcatcctccgcaatgtgtccagcctcgtcgccacccgtgaggactacaggcaggtgctccgggatcacaactgtctgcagacgctgctgcagcatctgacttcgcacagcctgaccatcgtgagcaacgcgtgcggcacgctctggaacctgtcggcccgcagcgcccgtgaccaggagctgctgtgggacctgggcgccgtgggcatgctgcgtaatctggtgcactccaagcacaagatgatcgccatgggcagcgccgccgccctgcgcaacctgctggcccatcggcccgccaagcaccaggcggccgccaccgccgtgtccccaggcagctgcgtgcccagcctgtacgtgcgcaagcagcgggcgctggaggccgagctggacgcacggcacctcgcgcaggcgctggagcacctggagaagcagggcccgccggcagccgaggccgccactaagaagccgctgccgcccctgcgacacctggacggcctggcccaagactatgcttccgattcgggctgctttgacgacgacgatgcaccgtcatccctggctgcggccgcggccaccggggagccagccagccctgccgcgctgtccctcttcctgggcagccccttcctgcaggggcaggcgctggctcgcaccccgcccacccgccgaggcggcaaggaggcagagaaggacaccagtggggaggcagccgtggcggccaaggccaaggccaagctggcgcttgcagtggcgcgcatcgaccagctggtggaggacatctccgccctgcacacctcgtccgacgatagcttcagcctcagctctggagacccgggacaggaggcgccacgggagggccgcgcccagtcctgctcgccatgccgcggcccggagggcgggcggcgagaggcaggaagccgggcgcacccgctgctgcggctcaaggcggcccacgccagcctctccaacgacagcctcaacagcggcagtgccagcgacgggtactgcccacgcgaacatatgctgccctgcccgctggccgcactggcttcgcgccgcgaggaccccaggtgtgggcagcctcggcccagccggcttgaccttgacctgcccggctgccaggccgagcccccggcccgcgaggccacctccgccgacgcccgcgtgcgcaccatcaagctgtcgcctacctatcagcacgtgccactgcttgagggtgcctcaagggcgggtgcagagcccctcgcggggcctggaatctctccaggggcccggaagcaggcctggctgccggcagaccacctgagcaaggttcccgagaagctggcggctgccccgctgtctgtggccagcaaggcactgcagaaactggcggcgcaagaggggccactctcgctgtcccgatgcagctccctttcctcgctgtcctcggccggccgcccaggccccagcgagggtggtgacctggatgacagtgactcctccctggaggggctggaggaggccggccccagcgaggctgagctggacagcacgtggcgggcgcccggggccacctcgctgcccgtagccattccggctccccggcgtaaccgaggccggggcctgggggtggaagacgccacgccgtccagctcgtcggagaactacgtgcaggagacaccgcttgtgctgagccgctgcagctctgtgagctcgctgggcagcttcgagagcccgtccatcgccagctccatccccagtgaaccttgcagcgggcagggcagcggcaccatcagccctagcgagctgcccgacagccccggacagaccatgcctcccagccggagcaagacgccaccgctggcgcccgcgccacagggtccccccgaggccacccagttcagcctgcagtgggagagctacgtgaagcgcttcctggacatcgccgactgccgggagcgctgccggctgccatctgagctggacgcaggcagcgtgcgctttaccgtggagaagccagacgagaacttctcgtgcgcctccagcctcagcgcgctggccttgcacgagcactacgtgcagcaggacgtggagctgcggctgctgccctcggcctgccccgagcgcggcgggggcgccgggggcgccggcctccactttgcagggcaccggcggcgggaggaggggccggcgcccacgggttctcgccctcgcggcgccgcggaccaggagctggaactgctgcgggagtgcctgggagccgccgtgcctgcccggctgcgcaaggtggcctccgcgctggtgccaggtcgccgcgcactccccgtgcccgtctacatgttggtgcccgccccggccccggcccaggaggacgactcctgcactgactccgcggagggcacgccggtcaacttctctagcgccgcctcgctcagcgacgagacgctgcagggaccccccagggaccagcccgggggaccagcgggcaggcaaagacccaccggccgccccacctctgccagacaggccatggggcaccggcacaaggcgggaggcgccggccgcagcgcggagcagtctcggggcgcgggcaagaacagagcagggctggagctgcccctgggccggcccccgagcgcccccgcagacaaggacggctcaaagcccggccggacccgcggggacggggcgctccagtcgctgtgcctcacgacgcccactgaggaggccgtgtactgcttctacggcaacgactcggacgaggagcccccggcggccgcgcccacgccaacccaccggcgcacatcggccatccctcgcgcttttacgcgggagcgtccgcagggccggaaggaggcccctgccccgtccaaggctgcaccagctgccccgccgcccgcccggacccagcccagcctcattgctgacgagaccccgccctgctactccctgagctcctccgccagctccctcagcgagcccgagccctcggagccgccggccgtccatccacgaggccgggagcccgcggtcaccaaggacccgggcccaggaggcggacgcgacagctcgcccagcccgcgggccgcggaggagcttctgcagcggtgcatcagctcggccctgcccaggcgccggccccccgtgtctggcctgcggcgccgcaagccccgagccacccggctggatgagcggcccgcagaggggtcccgggaacgcggcgaggaggcagcgggctcggaccgggcctccgacctggatagcgtggagtggcgcgccatccaggagggcgccaattcaattgtcacgtggctgcaccaggcagcagctgccacgcgggaggcctcgtccgagtccgactccatcctgtccttcgtatccgggctgtcagtgggatccaccctacagccccccaagcacaggaagggacgacaggcggagggagaaatgggcagtgcccggcggccagagaaaaggggcgcagcctcagtcaagaccagcgggagcccccgttcccctgcaggccccgagaagccacgtggcacacagaagaccacgcccggggtgccagctgtgctccggggacgaacagtgatctacgtccccagcccggcaccccgtgcccagcccaaagggacccccggcccccgcgccacaccgcggaaggtggcgcccccttgcctggcacagcccgcggctccagccaaagtcccgagccccgggcagcagcggtcgcggagcctacaccggcctgccaagacctcggagctggcgacgctgagccagccccccagaagcgccacaccgcccgcccgcctcgccaagaccccctcctccagctcctcccagacctcgcccgcctcccagcccctgcccagaaagcgccccccggtcacccaggctgctggggccctgcccggccccggagcctccccggtgcccaaaacgccggcgcgcacccttctggcgaagcagcacaagacgcagagatcgcccgtgcggatcccgttcatgcagaggccggcccggcgtgggccgccaccgctggctcgggcagtcccggagccgggccccaggggccgggcggggaccgaggcgggcccgggggcgcgcgggggccgcctgggcctggtgcgtgtggcctcagccctctccagcggcagcgagtcctccgaccgctcgggcttccggcgacagctaaccttcatcaaggagtcgccgggcttgcggcgccgccgctccgagctgtcctcggccgagtccgcggcctctgccccccagggcgcctcgccccgccgcggccggcccgcgctgcccgccgtcttcctctgctcctcgcgctgcgaagagctccgagcggcaccccggcagggcccggccccggcccggcagcggccccccgcggcccgacccagccctggcgagcgccctgcccggcgcaccacctccgagagcccgtcccgcctgcctgtgcgcgcgcccgccgcccggccggagactgtcaagcgctacgcgtcgctgccgcacatcagcgtggcccgcaggcccgacggcgccgtccccgcggcccctgcctcagccgacgccgcgcgccgcagcagcgacggggagccccggccgctccccagggtggccgcgccgggcacgacctggcggcgcatccgagatgaggacgtgccccacatcctgcgcagcacgcttcccgccacggccctgccactgcggggctccacgcccgaggacgccccggccgggcccccgccgcgcaagaccagcgacgccgtggtccagaccgaggaggtcgccgcccccaagaccaactccagcacgtccccgagcctggagaccagggagccccccggggcccccgccggcggccagctctccctcctcggcagcgacgtggacggtcccagcctcgccaaggctcccatctccgcacccttcgtgcacgagggcctgggggtcgccgtggggggcttccccgccagccggcacggctcccccagccgctcggcccgagtaccccccttcaactatgtgcccagccccatggtggtcgcagccaccaccgactcggccgcggagaaagccccggccactgcctccgccaccctcctggaatagtggcctaggccggccttctggaacgttctctcccggccctgcggcgcggtctggctgccccatgggcctgcgctgtagacgtcccccataggtcgccccagggcctctgcccacccgagccccaccactctcagaacccccgcccagcgcacggcgacctcgcgcctcaccggaagaccttgcctctgtgccgcggaggtccaggaggaaacggggcggccgctaggcctcaagtcccgaccgtggagcgctggcaagggcgtcctggcccagccctgagcgcgcggcccttcccctgtcggaagccgttgcttgaccccgggcgagggaggcggtagcctccgggtccgggtctgggtctgggtccgctgcttcgcagggacagcgctggggaggtgacggcgcccgccgcaggtggggcgaggctgggggagggcggcgccgcggcgggcctgccagctgggggcctttgcggcgcgcaggggcgaagcctgtaatcactgcagccgccggtaattcgctaatgagggctttgcagggattgttttcattctcagccccagctgtgggagtgcgggtgggggtgtggccgagccccggcaggaagccccgcccagacggtgttcagggaacccggagcccaagcgctccggcggagcccaaaagggtgggggtgggaggggcagaggccaacggatccccctgcctgtcgcaccccttggcgggagacgggaaggcagcgggctgcgtacgatgggaccctggtgcagacgccgggccggctgacatttggaccccatcccagaggagatgctggctaccagctggggcgaccccaagggtcgctggagtcagtatcggcccggcgcagccgcggcgggcgaggccaatggaaaggagactgaggggagtcccggcagtgagcccgaggccctgggacctggagcccgcgctggcctctccccagcggagcctgcacgttacggagaccatcacatgtgggcgtggtcagtgcccaggaccgcaccgctgctcatcttgtcccttttcaattcccttctggttcatgatgcataaagcgctaggccctagaactccagaaacagcacagctggggcggggacccagccttgccctccacccgaggctctgggacaaggcgggaggttcgggggccttccggcaggtgaacgcagggctggagagtatttggtgccagatgaggtgaaagcttatagaagggcctgaggggctcggctgcctcatcccctggcgggggaggctgggagctgggcctcctgcgtggggtgggactcgcaggggccgggtctccgtgactggggcaacgcctcgtcctgcagagggagccgacgacctcttttctgcagaaaagctccagcaggcgctgccttcacccacggatctgcccaggctgaaggcacacgctcaatgccccacgtgccttctccaggaggaacgaagcagggtttgagggttgggtggatggagctcagaaggaaaccccagccccaccacggatgacaccatccctcccgtcccatccccagcatgggcaaggccagcctttctggcagaaggagctgtcctcaactcagggccgctgtgagcaaagctgaccccagcccccacccccagttaacactgctgcttctctgaatgcatgtcacgctgcaccccatgctccgggcccacaccctgcaggacaaggagctccagacaggacgtccataagtcaccgaggtgtgccacccagcaggtgctggaggtgcccaatgctccctcctaggacctcgcagccaggcaaggctgtcaggttgttttgggggaagagggggtcatggatggctgagcagagagcggggaaaatgcaggctgagtggggcgacctcctgcctgccaggagccccctttcaggacacagcgggggtctcacacttgctgtccccatccatggcccgagggggaacctggtggtctcttctgagcttttggacttggggatgccaaacacgtgctcaccctcacactcgccccggcccgctgcgcccctaattgccaaagggtagggaaatggcgaagccagccaccaggtcgctggtgacagggccagggttatgcaggaaggtggtgcggcattgccttccacatatgtaagtctctgggcggcgccctcccagctccctgcctctgtttccccatgtgggccgtggggaactcccagagctacctcttgggggagcgtggtggcagcgatgatggggagacgcctggaagctcacagaacttgggtctggctggctcctgcccgtgacgccttgcccagcagcaaggtgcgcaacatggctgccagccccgcctcccacccccaccccgagtcctgagctcactttcgccttctccatcccctgccgtgggggccacagccacacctcaccgcccagtccagctgtctccagaaggggacaggcagtccgcggtctctggacaatcaactcaaggtacgcccactgcaaggcctccctcccaccgcggcccctgcctggccacctggcctctctgcaccagggtgacaaggggtcctcgtctgccccccaatgctccagggccagtcctaaggagctgagggtctgaggacgcagggagggtggaggtgtcctgaggctgatggacagtgaccgccactggcccccaacatgaccacacgtgggtgctgaactcggggcgccgtgcccaccggcatggtcctcccgagctccgacagcattacctcacccggccccatctgttgccccggtccagccctgatggcgcgcgcctggtctgtctgattcccctagccgccaccccacgtttctgtaccgggtctctgcagtgttaaacggacgtgtaaatagtggtaaatagtgaaagcctgtccttccctaaatgtaaagccatctgtccggcgtaaggacgacaccgtcagctgtccgactcgcacacatttaataaactgagctcttgcattgcc

SEQ ID NO: 22 - DNA, 1619 bp, Homo sapiens
tcagccgctccctctgggcttccgtcctccgcccgcgcccgacggagcctgttcgcgtcgactgcccagagtccgcgaatcctccgctccgagcccgtccggactcccccgatcccagctttctctcctttgaaaacactaagaataatgtcactgcatcagtttttactagagccaatcacctgtcatgcctggaacagggatcgtactcagattgccctcagtcccaataatcacgaagtgcacatctataagaagaacgggagccagtgggtgaaagctcatgaactcaaggagcacaacggacacatcacaggtattgactgggctcccaagagcgaccgcattgtcacttgtggggcagaccgcaatgcctatgtctggagtcagaaagatggtgtttggaagccaaccctggtgatcctgagaattaatcgcgcagctacttttgtgaagtggtcccccctagagaacaaatttgctgtgggaagtggagcacgactcatttctgtttgttactttgagtctgaaaatgactggtgggtgagcaagcacattaaaaagccgattcgctccacagtcctcagcttggattggcatcccaacaacgttttgctggcagcaggatcatgtgacttcaaatgcagagtgttttctgcctacattaaagaagtggatgaaaagccagccagcacgccctggggcagcaagatgccttttgggcagctgatgtcagagtttggtggcagtggcactggtggctgggtccacggggtaagcttctctgccagtgggagccgcctggcctgggtcagccacgacagcaccgtgtctgttgctgatgcctcaaaaagtgtgcaggtctcgactctgaagacagagttcctgccgctcctaagtgtgtcatttgtctcagagaacagcgtcgtggctgctggccatgactgctgcccaatgctctttaactacgatgaccgcggctgcctgaccttcgtctccaagttagatattccaaaacagagcatccaacgcaacatgtctgccatggaacgcttccgcaacatggacaagagagccacaactgaggaccgcaacacggccttggagacgctgcaccagaatagcatcactcaagtctctatttatgaggtggacaagcaagattgtcgcaaattttgcactactggcatcgatggagccatgacaatttgggatttcaagaccctcgagtcttccatccagggcctccggataatgtgaagctgagtgagcctccgccatccagcatgacaaactgtggccgaccgcagctgtgccgtggcacgatggcgaggaagccagccccaaggaaacactgaaaacacatatcacgccaatgccgtgtggttttgtttgaatataaaattggtgaaagtgttggtttttttaaggcagtaatttttttgtttgtttttttgcgatttcattccattcttgaccaaagcttctctttaagtagtttattatggaaaattgtcacactaacttaaaagacagggtgagggagatatgtaaattgtccactagaaaattaaataaaagaactgaatgtggaaaaaaaaaaaaaaaaaaaaaaaaaa

SEQ ID NO: 23 - DNA, 1520 bp, Homo sapiens
ggctgctgctccggcgcggagcccagagccggttcggcgcgtcgactgcccagagtccgcggccggggcgcgggaggagccaagccgccatggcctaccacagcttcctggtggagcccatcagctgccacgcctggaacaaggaccgcacccagattgccatctgccccaacaaccatgaggtgcatatctatgaaaagagcggtgccaaatggaccaaggtgcacgagctcaaggagcacaacgggcaggtgacaggcatcgactgggcccccgagagtaaccgtattgtgacctgcggcacagaccgcaacgcctacgtgtggacgctgaagggccgcacatggaagcccacgctggtcatcctgcggatcaaccgggctgcccgctgcgtgcgctgggcccccaacgagaacaagtttgctgtgggcagcggctctcgtgtgatctccatctgttatttcgagcaggagaatgactggtgggtttgcaagcacatcaagaagcccatccgctccaccgtcctcagcctggactggcaccccaacaatgtgctgctggctgccggctcctgtgacttcaagtgtcggatcttttcagcctacatcaaggaggtggaggaacggccggcacccaccccgtggggctccaagatgccctttggggaactgatgttcgaatccagcagtagctgcggctgggtacatggcgtctgtttctcagccagcgggagccgcgtggcctgggtaagccacgacagcaccgtctgcctggctgatgccgacaagaagatggccgtcgcgactctggcctctgaaacactaccactgctggcgctgaccttcatcacagacaacagcctggtggcagcgggccacgactgcttcccggtgctgttcacctatgacgccgccgcggggatgctgagcttcggcgggcggctggacgttcctaagcagagctcgcagcgtggcttgacggcccgcgagcgcttccagaacctggacaagaaggcgagctccgagggtggcacggctgcgggcgcgggcctagactcgctgcacaagaacagcgtcagccagatctcggtgctcagcggcggcaaggccaagtgctcgcagttctgcaccactggcatggatggcggcatgagtatctgggatgtgaagagcttggagtcagccttgaaggacctcaagatcaaatgacctgtgaggaatatgttgccttcatcctagctgctggggaagcggggagaggggtcagggaggctaatggttgctttgctgaatgtttctggggtaccaatacgagttcccataggggctgctccctcaaaaagggaggggacagatggggagcttttcttacctattcaaggaatacgtgcctttttcttaaatgctttcatttattgaaaaaaaaaaaaaatgcccccaaagcactatgctggtcatgaactgcttcaaaatgtggaggtaataaaatgcaactgtgtaaaaaaaaaaaaaaaaaaaaaa

SEQ ID NO: 24 - DNA, 1462 bp, Homo sapiens
ggccggctagagccgggggctgggcggggaccgggcttgtcggtgaagcggcagtggcggcggcggcggcggctcggcaggcgggttcaggcttcgggggccagccgccgccatgatcctgctggaggtgaacaaccgcatcatcgaggagacgctcgcgctcaagttcgagaacgcggccgccggaaacaaaccggaagcagtagaagtaacatttgcagatttcgatggggtcctctatcatatttcaaatcctaatggagacaaaacaaaagtgatggtcagtatttctttgaaattctacaaggaacttcaggcacatggtgctgatgagttattaaagagggtgtacgggagtttcttggtaaatccagaatcaggatacaatgtctctttgctatatgaccttgaaaatcttccggcatccaaggattccattgtgcatcaagctggcatgttgaagcgaaattgttttgcctctgtctttgaaaaatacttccaattccaagaagagggcaaggaaggagagaacagggcagttatccattatagggatgatgagaccatgtatgttgagtctaaaaaggacagagtcacagtagtcttcagcacagtgtttaaggatgacgacgatgtggtcattggaaaggtgttcatgcaggagttcaaagaaggacgcagagccagccacacagccccacaggtcctctttagccacagggaacctcctctggagctgaaagacacagacgccgctgtgggtgacaacattggctacattacctttgtgctgttccctcgtcacaccaatgccagtgctcgagacaacaccatcaacctgatccacacgttccgggactacctgcactaccacatcaagtgctctaaggcctatattcacacacgtatgcgggcgaaaacgtctgacttcctcaaggtgctgaaccgcgcacgcccagatgccgagaaaaaagaaatgaaaacaatcacggggaagacgttttcatcccgctaatcttgggaataagaggaggaagcggctggcaactgaaggctggaacacttgctactggataatcgtagcttttaatgttgcgcctcttcaggttcttaagggattctccgttttggttccattttgtacacgtttggaaaataatctgcagaaacgagctgtgcttgcaaagacttcatagttcccaagaattaaaaaaaaaaaaaaaagaattccacttgatcaacttaattccttttctttatcttccctccctcacttcccttttctcccaccctcttttccaagctgtttcgctttgcaatatattactggtaatgagttgcaggataatgcagtcataacttgttttctcctaagtatttgagttcaaaactcctgtatctaaagaaatacggttggggtcattaataaagaaaatctttctatcttaaaaaaaaaaaaaaa

SEQ ID NO: 25 - DNA, 912 bp, Homo sapiens
cgcttccgcctacctcgcccaggctgccagaccggaagcgctccgctgtacctggatcctgctcctctgggttgaaacccgggcgccgccaagatgccggcttaccactcttctctcatggatcctgataccaaactcatcggaaacatggcactgttgcctatcagaagtcaattcaaaggacctgcccccagagagacaaaagatacagatattgtggatgaagccatctattacttcaaggccaatgtcttcttcaaaaactatgaaattaagaatgaagctgataggaccttgatatatataactctctacatttctgaatgtctgaagaaactgcaaaagtgcaattccaaaagccaaggtgagaaagaaatgtatacgctgggaatcactaattttcccattcctggagagcctggttttccacttaacgcaatttatgccaaacctgcaaacaaacaggaagatgaagtgatgagagcctatttacaacagctaaggcaagagactggactgagactttgtgagaaagttttcgaccctcagaatgataaacccagcaagtggtggacttgctttgtgaagagacagttcatgaacaagagtctttcaggacctggacagtgaagggagcccgggcagccaccgtctccagagccctgggcagcattttccagcaagatgtacacaatcttttgcctttatttcgtaaagttttatacagaagagagaagagcatgtctttacttgaaaaactcttgatcaagaatttgggtgggagaaaagaaagtgggttatcaagggtgatttgaaattttctgcagcattaaagctggcgcttaataagaataagtaataataaagaaatttctaacattccaaaaaaaaaaaaaaaaaaaaaaaaaaaaa

SEQ ID NO: 26 - DNA, 1976 bp, Homo sapiens
gccgggggtgggaagaaggtgggcctcgagcaaagccgctagaggtggggtgcgggtggtcggcctcaggcgagccccggggcacagcccggggcgggaggcggagcttggcggccgagatctccgcgctgcagttagccccgccgagcgccaggagctgcgggtaggaggggcgagagaaaggatgggggtacagaaccggaagaaacgaagggctcgtccgcttcggcttgtcctaatttggtgcccaatctgaagctgggctgtaccattgcatacctgggggaggctgtggcaaaggtgacaagaaggccgaaggcacaaagggaagctgcacccattcctggaggagcttaaatagtgactcgagtgcaagaatttaaaaataccgagacagccctaggtggaaaacttccggaaggcccaagcgttcgtaagggctctctaccccgctcggagcatagatggtaccgtccggaagtccgggcggagaccgtagctgcgcttctcgcgaaagggcaggcatcgcggggctggccacttccgtacttccgctttccggcccagccagcgcccgcgatgactgccactctccgcccctacctgagtgccgtgcgggccacattgcaggctgccctctgcctggagaacttctcctcccaggttgtggaacgacacaacaagccggaagtggaagtcaggagtagcaaagagctcctgttacaacctgtgaccatcagcaggaatgagaaggaaaaggttctgattgagggctccatcaactctgtccgggtcagcattgctgtgaaacaggctgatgagatcgagaagattttgtgccacaagttcatgcgcttcatgatgatgcgagcagagaacttctttatccttcgaaggaagcctgtggaggggtatgatatcagctttctgatcaccaacttccacacagagcagatgtacaaacacaagttggtggactttgtgatccacttcatggaggagattgacaaggagatcagtgagatgaagctgtcagtcaatgcccgtgcccgcattgtggctgaagagttccttaagaatttttaaaccatctggctggatctcgtggccttccccctcagactacccatgtctccacgaaggcgtcctggagtcactccccgagcagcgcggcggcggcagggagttgggttggggtgggcatttgatgcgggaggtgggtggtgtgcttgctagctgggcaagaaagcagcagtggacctgccccaaggccacacgtgcctggtcaggctggcttctgatgttcagtcccctgggccgggacagattttttttaacgtcttgaaacttaaactctgtgcttgtaggatactgtaacctttttgtctttttttttttttttttttttaaacctccacctccagtggctgtgactggtcccagtgattatacgttattggttgctgtgggtctgggcgggcctggagccagaaggcgacttattttttctctcctatgccaccccaggtggggagggagggaggtttcagactccagtttctcccttgcccttttattcccaagcctccttggccccagtataagtgttgggaactctctgccagcttcctgagttctgcctaaagatggccccccagcactggttggggacaagggccaaattggtgaccaccagtcatgcctaggacctggggcccaaaagccgggcaacctctggctacaggggccattgggtgccctcccagttgagaggggccgctgtttcgccttgtccgtcagtgccagtgcctgtgccagaggtggcgaggtgagtcctccagagcttcctggccgggccctcctcctgcctgttctggctcctctgctcccacgctagctgtcccttttctgattctggtggatcctccctcccctaattaaagtctctttttgcccctttggggctgcatgaggtc

SEQ ID NO: 27 - DNA, 2000 bp, Homo sapiens
gggagcgcgaacctgaggaggaagaaacggggctagcgcgcaggcccagaacggtccgagccgcggcagtcggcgacgcctcagagcggaagagggaagtgaatcaggcgccgggtagtgggttgctgggctgggcttgctgaggtagaggcagcgccaagaagaggcctttgccgctggtcgggattgggatgtcgaagaacacagtgtcgtcggcccgcttccggaaggtggacgtggatgaatatgacgagaacaagttcgtggacgaagaagatgggggcgacggccaggccgggcccgacgagggcgaggtggactcctgcctgcggcaaggaaacatgacagctgccctacaggcagctctgaagaacccccctatcaacaccaagagtcaggcagtgaaggaccgggcaggcagcattgtcttgaaggtgctcatctcttttaaagctaatgatatagaaaaggcagttcaatctctggacaagaatggtgtggatctcctaatgaagtatatttataaaggatttgagagcccgtctgacaatagcagtgctatgttactgcaatggcatgaaaaggcacttgctgctggaggagtagggtccattgttcgtgtcttgactgcaagaaaaactgtgtagtctggcaggaagtggattatctgcctcgggagtgggaattgctggtacaaagaccaaaacaaccaaatgccaccgctgccctgtgggtagcatctgtttctctcagctttgccttcttgctttttcatatctgtaaagaaaaaaattacatatcagttgtcctttaatgaaaattgggataatatagaagaaattgtgttaaaatagaagtgtttcatcctttcaaaaccatttcagtgatgtttataccaatctgtatatagtataatttacattcaagtttaattgtgcaacttttaacccctgttggctggttttttgttctgttttgttttgtattatttttaactaatactgagagatttggtcagaatttgaggccagtttcctagctcattgctagtcaggaaatgatatttataaaaaatatgagagactggcagctattaacattgcaaaactggaccatatttcccttatttaataagcaaaatatgtttttggaataagtggtgggtgaataccactgctaagttatagctttgtttttgcttgcctcctgattatctgtactgtgggtttaagtatgctactttctctcagcatccaataatcatggcccctcaatttatttgtggtcacccagggttcagagcaagaagtcttgctttatacaaatgtatccataaaatatcagagcttgttgggcatgaacatcaaacttttgttccactaatatggctctgtttggaaaaaactgcaaatcagaaagaatgatttgcagaaagaaagaaaaactatggtgtaatttaaactctgggcagcctctgaatgaaatgctactttctttagaaatataatagctgccttagacattatgaggtatacaactagtatttaagataccatttaatatgccccgtaaatgtcttcagtgttcttcagggtagttgggatctcaaaagatttggttcagatccaaacaaatacacattctgtgttttagctcagtgttttctaaaaaaagaaactgccacacagcaaaaaattgtttactttgttggacaaaccaaatcagttctcaaaaaatgaccggtgcttataaaaagttataaatatcgagtagctctaaaacaaaccacctgaccaagagggaagtgagcttgtgcttagtatttacattggatgccagttttgtaatcactgacttatgtgcaaactggtgcagaaattctataaactctttgctgtttttgatacctgctttttgtttcattttgttttgttttgtaaaaatgataaaacttcagaaaataaaatgtcagtgttgaataaaaaaaaaaaaaaaaaaaa

SEQ ID NO: 28 - DNA, 3477 bp, Homo sapiens
ggtcccgcccgccgcgctgccgctgagcgcatgggcccggaccgcgccgcgccgctccgggagccgggcccggggtcccgccaccaccgcgcgcgggacagattgattcactttggagctgtaagtactgatgtattagggtgcagcgctcattgttccttgacgcagagtcccaaaatgaatatccaagagcagggtttccccttggacctcggagcaagtttcaccgaagatgctccccgacccccagtgcctggtgaggagggagaactggtgtccacagacccgaggcccgccagctacagtttctgctccgggaaaggtgttggcattaaaggtgagacttcgacggccactccgaggcgctcggatctggacctggggtatgagcctgagggcagtgcctcccccaccccaccatacttgaagtgggctgagtcactgcattccctgctggatgaccaagatgggataagcctgttcaggactttcctgaagcaggagggctgtgccgacttgctggacttctggtttgcctgcactggcttcaggaagctggagccctgtgactcgaacgaggagaagaggctgaagctggcgagagccatctaccgaaagtacattcttgataacaatggcatcgtgtcccggcagaccaagccagccaccaagagcttcataaagggctgcatcatgaagcagctgatcgatcctgccatgtttgaccaggcccagaccgaaatccaggccactatggaggaaaacacctatccctccttccttaagtctgatatttatttggaatatacgaggacaggctcggagagccccaaagtctgtagtgaccagagctctgggtcagggacagggaagggcatatctggatacctgccgaccttaaatgaagatgaggaatggaagtgtgaccaggacatggatgaggacgatggcagagacgctgctccccccggaagactccctcagaagctgctcctggagacagctgccccgagggtctcctccagtagacggtacagcgaaggcagagagttcaggtatggatcctggcgggagccagtcaacccctattatgtcaatgccggctatgccctggccccagccaccagtgccaacgacagcgagcagcagagcctgtccagcgatgcagacaccctgtccctcacggacagcagcgtggatgggatccccccatacaggatccgtaagcagcaccgcagggagatgcaggagagcgtgcaggtcaatgggcgggtgcccctacctcacattccccgcacgtaccgggtgccgaaggaggtccgcgtggagcctcagaagttcgcggaggagctcatccaccgcctggaggctgtgcagcgcacgcgggaggccgaggagaagctggaggagcggctgaagcgcgtgcgcatggaggaggaaggtgaggacggcgatccatcgtcagggcccccagggccgtgtcacaagctgcctcccgcccccgcttggcaccacttcccgccccgctgtgtggacatgggctgtgccgggctccgggatgcacacgaggagaaccctgagagcatcctggacgagcacgtacagcgtgtgctgaggacacctggccgccagtcgcctgggcctggccatcgctccccggacagtgggcacgtggccaagatgccagtggcactggggggtgccgcctcggggcacgggaagcacgtacccaagtcaggggcgaagctggacgcggccggcctgcaccaccaccgacacgtccaccaccacgtccaccacagcacagcccggcccaaggagcaggtggaggccgaggccacccgcagggcccagagcagcttcgcctggggcctggaaccacacagccatggggcaaggtcccgaggctactcagagagtgttggcgctgcccccaacgccagtgatggcctcgcccacagtgggaaggtgggcgtggcgtgcaaaagaaatgccaagaaggctgagtcggggaagagcgccagcaccgaggtgccaggtgcctcggaggatgcggagaagaaccagaaaatcatgcagtggatcattgagggggaaaaggagatcagcaggcaccgcaggaccggccacgggtcttcggggacgaggaagccacagccccatgagaactccagacccttgtcccttgagcacccctgggccggccctcagctccggacctccgtgcagccctcccacctcttcatccaagaccccaccatgccaccccacccagctcccaaccccctaacccagctggaggaggcgcgccgacgtctggaggaggaagaaaagagagccagccgagcaccctccaagcagaggtatgtgcaggaggttatgcggcggggacgcgcctgcgtcaggccagcgtgcgcgccggtgctgcacgtggtaccagccgtgtcggacatggagctctccgagacagagacaagatcgcagaggaaggtgggcggcgggagtgcccagccgtgtgacagcatcgttgtggcgtactacttctgcggggaacccatcccctaccgcaccctggtgaggggccgcgctgtcaccctgggccagttcaaggagctgctgaccaaaaagggcagctacagatactacttcaagaaagtgagcgacgagtttgactgtggggtggtgtttgaggaggttcgagaggacgaggccgtcctgcccgtctttgaggagaagatcatcggcaaagtggagaaggtggactgataggctggtgggctggccgctgtgccaggcgaggcccttggcgggcacgggtgtcacggccaggcagatgacctcgtactcaggagcccgatggggaacagtgttgggtgtaccacccatccctgtggtctacccgtgtctagaggcaggtagggggtccctccaagtggtccacaagcttctgtcctgcccccaaggaggcagcctggaccactcctcatagcaatacttggagggcccagcccaagtgaggcagccgaggtccctgctgccagcttcaggtgacccccccccatcccccggcacctcccttgggcacgtgtgctgggatctactttccctctgggatttgcccacgtacccaggtctgggtggggcccaggcccggatgcagaggcctgcagggcctctgtcaattgtacgcgccaccgagtgccttcaacacagcttgtctcttgcctgccactgtgtgaatcggcgacggagcactgcacctgcctccagccgccggctgtgcagtcctgggtcctcctttctgagggcccgtgtaaatatgtacatttctcaggctaggccagcaggggctgcccgagtctgtttttcatgcgatgacacttgtacaattaattatcttttcaaaggtacttggataataatgaaataaaactgtttttgaacctgcaaaaaaaaaaaaaaaaaaaaaaaaaaaaa

SEQ ID NO: 29 - DNA, 4259 bp, Homo sapiens
cggctgtgattggcgcggcgggatcactggctccgcgagcctggcccgggggagtcggctggagccggctgcgctttgataaggtcctggcaactcagtaacagcccgagagccgggaaataaaaataacccctcagagcgatggatttcggggccgcccggcggccgaggcgcccgccgaaggccctgctgtaaaagagaggaggttcagatgagcccctgctgacttgagagagacagagagaccacgccgattgctgagaggaactggaagaagaaaaattcccagactcagtgggaagagctccctcaccatgagtagcgctatgttggtgacttgcctcccggaccccagcagcagcttccgtgaggatgccccgcggcccccagtgccaggggaagaaggggagaccccaccgtgtcagccaggggtgggcaagggccaggtcaccaaacccatgtctgtctcttccaacaccaggcggaacgaagatgggttgggggagccggaggggcgggcatctccggattcccctctgacccggtggaccaagtccttacactccttattgggcgatcaagacggtgcttacctgttccgaactttcctggagagggagaaatgcgtggataccttagacttctggtttgcctgcaatggattcaggcagatgaacctgaaggataccaaaactttacgagtagccaaagcgatctacaaaaggtacattgagaacaacagcattgtctccaagcagctgaagcctgccaccaagacctacataagagatggcatcaagaagcagcagattgattccatcatgtttgaccaggcgcagaccgagatccagtcggtgatggaggaaaatgcctaccagatgtttttgacttctgatatatacctcgaatatgtgaggagtgggggagaaaacacagcttacatgagtaatgggggactcgggagcctaaaggtcgtgtgtggctatctccccaccttgaatgaagaagaggagtggacttgtgccgacttcaagtgcaaactttcgccaaccgtggttggcttgtccagcaaaactctgagggccacggcgagtgtgaggtccacggaaactgttgacagtggatacaggtccttcaagaggagcgatcctgttaatccttatcacataggttctggctatgtctttgcaccagccaccagcgccaacgacagtgagatatccagtgatgcgctgacggatgattccatgtccatgacggacagcagtgtagatggaattcctccttatcgtgtgggcagtaagaaacagctccagagagaaatgcatcgcagtgtgaaggccaatggccaagtgtctctacctcatttcccgagaacccaccgcctgcccaaggagatgacccccgtggaacccgccacctttgcagctgagctgatctcgaggctggaaaagctgaagctggagttggagagccgccacagcctggaggagcgcctgcagcagatccgagaggatgaagagagagagggctccgagctcacactcaattcgcgggagggggcgcccacgcagcaccccctctccctactgccctccggcagctacgaggaagacccgcagacgatactggacgatcacctgtccagggtcctcaagacccctggctgccagtctccgggcgtaggccgctatagccctcgctcccgctccccggaccaccaccaccaccaccattcgcagtaccactccctgctcccgcccggtggcaagctgcctcccgcggccgcctcgccgggcgcctgccccctcctcgggggcaaaggctttgtgaccaagcagacgacgaagcatgtccaccaccactacatccaccaccatgccgtccccaagaccaaggaggagatcgaggcggaggccacgcagcgggtgcactgcttctgccctgggggcagcgagtattacagctactcgaaatgcaaaagccactccaaggctccggaaaccatgcccagcgagcagtttggcggcagcagaggcagtaccttgcccaaacgcaatgggaaaggcacggagccgggcctggccctgcccgccagggaaggaggggcccccggcggagctggggccctgcagcttccccgggaggaaggagacaggtcgcaggatgtctggcagtggatgctggagagtgagcggcagagcaagcccaagccccatagtgcccaaagcacaaaaaaggcctaccccttggagtctgcccgctcgtctccaggcgaacgagccagccggcaccatctgtgggggggcaacagcgggcacccccgcaccaccccccgtgcccacctgttcacccaggaccctgcgatgcctcccctgaccccacccaacacgctggctcagctggaggaggcctgtcgcaggctagctgaggtgtcgaagcccccaaagcagcggtgctgtgtggccagtcagcagagggacaggaatcattcggccactgttcagacgggagccacacccttctccaatccaagcctggctccagaagatcacaaagagccaaagaaactggcaggtgtccacgcgctccaggccagtgagttggttgtcacttactttttctgtggggaagaaattccataccggaggatgctgaaggctcagagcttgaccctgggccactttaaagagcagctcagcaaaaagggaaattataggtattacttcaaaaaagcaagcgatgagtttgcctgtggagcggtgtttgaggagatctgggaggatgagacggtgctcccgatgtatgaaggccggattctgggcaaagtggagcggatcgattgagccctggggtctggctttggtgaactgttggagcccgaagctcttgtgaactgtcttggctgtgagcaactgcgacaaaacattttgaaggaaaattaaaccaatgaagaagacaaagtctaaggaagaatcggccagtgggccttcgggagggcggggggaggttgattttcatgattcatgagctgggtactgactgagataagaaaagcctgaactatttattaaaaacatgaccactcttggctattgaagatgctgcctgtatttgagagactgccatacataatatatgacttcctagggatctgaaatccataaactaagagaaactgtgtatagcttacctgaacaggaatccttactgatatttatagaacagttgatttcccccatccccagtttatggatatgctgctttaaacttggaagggggagacaggaagttttaattgttctgactaaacttaggagttgagctaggagtgcgttcatggtttcttcactaacagaggaattatgctttgcactacgtccctccaagtgaagacagactgttttagacagactttttaaaatggtgccctaccattgacacatgcagaaattggtgcgttttgtttttttttttcctatgctgctctgttttgtcttaaaggtcttgagggttgaccatgttgcgtcatcatcaacattttgggggttgtgttggatgggatgatctgttgcagagggagaggcagggaaccctgctccttcgggccccaggttgatcctgtgactgaggctccccctcatgtagcctccccaggcccagggccctgaggcctgctagaatcactgccgctgtgctttcgtggaaatgacagttccttgttttttttgtttctgtttttgttttacattagtcattggaccacagccattcaggaactaccccctgccccacaaagaaatgaacagttgtagggagacccagcagcacctttcctccacacaccttcattttgatgttcgggtttttgtgttaagttaatctgtacattctgtttgccattgttacttgtactatacatctgtatatagtgtacggcaaaagagtattaatccactatctctagtgcttgactttaaatcagtacagtacctgtacctgcacggtcacccgctccgtgtgtcgccctatattgagggctcaagctttcccttgttttttgaaaggggtttatgtataaatatattttatgcctttttattacaagtcttgtactcaatgacttttgtcatgacattttgttctacttatactgtaaattatgcattataaagagttcatttaaggaaaattacttggtacaataattattgtaattaagagatgtagcctttattaaaattttatatttttcaaaa

SEQ ID NO: 30 - DNA, 987 bp, Homo sapiens
aatataagtggaggcgtcgcgctggcgggcattcctgaagctgacagcattcgggccgagatgtctcgctccgtggccttagctgtgctcgcgctactctctctttctggcctggaggctatccagcgtactccaaagattcaggtttactcacgtcatccagcagagaatggaaagtcaaatttcctgaattgctatgtgtctgggtttcatccatccgacattgaagttgacttactgaagaatggagagagaattgaaaaagtggagcattcagacttgtctttcagcaaggactggtctttctatctcttgtactacactgaattcacccccactgaaaaagatgagtatgcctgccgtgtgaaccatgtgactttgtcacagcccaagatagttaagtgggatcgagacatgtaagcagcatcatggaggtttgaagatgccgcatttggattggatgaattccaaattctgcttgcttgctttttaatattgatatgcttatacacttacactttatgcacaaaatgtagggttataataatgttaacatggacatgatcttctttataattctactttgagtgctgtctccatgtttgatgtatctgagcaggttgctccacaggtagctctaggagggctggcaacttagaggtggggagcagagaattctcttatccaacatcaacatcttggtcagatttgaactcttcaatctcttgcactcaaagcttgttaagatagttaagcgtgcataagttaacttccaatttacatactctgcttagaatttgggggaaaatttagaaatataattgacaggattattggaaatttgttataatgaatgaaacattttgtcatataagattcatatttacttcttatacatttgataaagtaaggcatggttgtggttaatctggtttatttttgttccacaagttaaataaatcataaaacttgatgtgttatctctta

SEQ ID NO: 31 - DNA, 3241 bp, Homo sapiens
gaggcggcagctgcgcggcggcaccggggcggctgcggcgcgctcggagccccgagggcacgcggcccgggcagctcggtgtgcgcccccgcgagagccggggccccaggcccgccggacaccatgaaccacctgaacgtgctggccaaagcgctctatgacaatgtggccgagtccccggatgagctctccttccgcaagggtgacatcatgacggtgctggagcaggacacgcagggcctggacggctggtggctctgctcgctgcatgggcgccagggcatcgtgcctgggaaccgcctcaagatcttggtgggcatgtatgataagaagccagcagggcctggccccggccctcccgccaccccggcccagcctcagcctggcctccatgccccagcgcctccggcctcccagtacacgcccatgctccccaacacctaccagccccagccagacagcgtctacctggtgcccactcccagcaaggctcagcaaggcctctaccaagtcccgggtcccagccctcagttccagtctcccccagccaagcagacatccaccttctcgaagcagacaccccatcacccgtttcccagcccggccacagacctgtaccaggtgcccccagggcctggaggccctgcccaggatatttaccaggtgccaccttctgccgggatggggcatgacatctaccaggtccccccgtccatggacacacgcagctgggagggcacgaagcccccggcaaaggtggtggtgcccacccgcgtggggcagggctatgtatacgaggccgcccagccggagcaggacgagtacgacatcccgcgacacctgctggccccggggccacaggacatctatgatgtgcccccggttcgggggctgcttcccagccagtatggccaggaggtgtatgacacaccccccatggctgtcaagggtcccaatggccgagacccgttgctggaggtgtatgacgtgccccccagtgtggagaagggcctgccaccgtccaaccaccacgcagtctacgacgttcctccatcggtgagcaaggatgtgcccgatggcccactgctgcgtgaggagacctacgatgtgccccccgccttcgccaaggccaagccctttgacccggcccgcaccccactggtactggctgcgccccctccagactccccgccggccgaggacgtgtatgacgtgccgcccccggctcctgacctctacgacgtgccccctggcttgcggcggcctggcccgggcaccctgtacgatgtgccccgtgaacgggtgcttcctcctgaggtggctgatggtggcgtggtcgacagtggtgtgtatgcggtgcctcccccagctgaacgtgaagccccggcagagggcaagcgcctgtcggcctccagcaccggcagcacacgcagcagccagtctgcgtcctccttggaggtggcagggccgggccgggaacccctggagctggaagttgctgtggaggccctggcacggctgcagcagggtgtgagcgccaccgttgcccaccttctggacctggcaggcagcgccggtgcgactgggagctggcgtagcccctctgagccacaggagccgctggtgcaggacctgcaggctgctgtggccgctgtccagagtgccgtccacgagctgttggagtttgcccgcagcgcggtgggcaatgctgcccacacatctgaccgtgccctgcatgccaagcttagccggcagctgcagaagatggaggacgtgcaccagacgctggtggcacatggtcaggccctcgacgctggccggggaggctctggagccacccttgaggacctggaccggctggtggcctgctcgcgggctgtgcccgaggacgccaagcagctggcctccttcctgcacggcaatgcctcactgctcttcagacggaccaaggccactgccccggggcctgaggggggtggcaccctgcaccccaaccccactgacaagaccagcagcatccagtcacgacccctgccctcaccccctaagttcacctcccaggactcgccagatgggcagtacgagaacagcgaggggggctggatggaggactatgactacgtccacctacaggggaaggaggagtttgagaagacccagaaggagctgctggaaaagggcagcatcacgcggcagggcaagagccagctggagttgcagcagctgaagcagtttgaacgactggaacaggaggtgtcacggcccatagaccacgacctggccaactggacgccagcccaacccctggccccggggcgaacaggcggcctggggccctcggaccggcagctgctgctcttctacctggagcagtgtgaggccaacctgaccacactgaccaacgccgtggacgccttctttaccgccgtggccaccaaccagccgcccaagatctttgtggcgcacagcaagttcgtcatcctcagcgcccacaagctggtgttcatcggggacacactgtcacggcaggccaaggctgctgacgtgcgcagccaggtgacccactacagcaacctgctgtgcgacctcctgcgcggcatcgtggccaccaccaaggccgctgccttgcagtacccatcgccttccgcggcccaggacatggtggagagggtcaaggagctgggccacagcacccagcagttccgccgcgtcctaggccagctggcagccgcctgagggtggtgaccccaggagggaggcaggggaggggtgcggcggtcccagctccctggctcccatgtcaagagtcgctgtgccacaggcttagggacaggaccccagctctgcgtcggtcctggtgccctggatgcccaggaatctgtatatatttatggccgggcagggtgtggggccatgcctcctcaggagccgaagcccaggggccggccagtggccttccccagcatgcaccacgggcccgggttgggtcaccagacggggctggagtgtgagggtcctgcagcctgcaggacctcgtgccaccccgagggctgagcctggtcccacgagggtgccgtgtcccctgacagggccagtgcagtttggtgtgtcctccgccttaccaggagaagaacctgaagaactatttttcgttattggttttccaatcatttgactaagagtctccatttaaataaagtttttaaaaggaagagcaaaaaaaaaaaaaaaaaaaaaaaaa

SEQ ID NO: 32 - DNA, 6278 bp, Homo sapiens
cttccatgtgtgaaagctacttggcatgaatgcctgggccgtaccaagtgtcaccgcagcaagagggggagtcagaagaaaaacagatcagaccagagcagacaataggcccctaaagtgttccccctaagttgctttgatgttgtcctggtgtcttgataccaggaggccagggattgcaggaaaagggtcttttttgtcttcattcactttcccccctcagtttctgaaatgattctccagaatttctcctcataaaaaaggactgaatgtgggcccagttggcgtcattctgctttgacctaaacattcccatctgattgggtggcagagatcatttttggaaagttcttccgtgtcccgatgtagaagaaatagcaaattggacatattgaaagacaagggtcatctttgagaagggggttcctggactcctcacctccaggatgagcactgcagtgtcgtgacccttggggttttgtatgccctggagatgcgagattttcctctggcagcaggaggcacgcacccagagaatgctggagctgcaaggggaaaggacccacttccacagcagagaaaaacaaagaggaaaaaggcatacaggcagcgagcgctaagggacgcacccagcaagcagtgggccagtgccactgcccccagcagctgtttctgctgcaacccgagaggaactcggtgagcctgtcccgtttgtgactgcaagctcaggatttcaatcaatgcattccagtaaccctaaagtgaggagctctccatcaggaaacacacagagtagccctaagtcaaagcaggaggtgatggtccgtccccctacagtgatgtccccatctggaaacccccagctggattccaaattctccaatcagggtaaacaggggggctcagccagccaatcccagccatccccctgtgactccaagagtgggggccatacccctaaagcactccctggcccaggtgggagcatggggctgaagaatggggctggaaatggtgccaagggcaaggggaaaagggagcgaagtatttccgccgactcctttgatcagagagatcctgggactccaaacgatgactctgacattaaagaatgtaattctgctgaccacataaagtcccaggattcccagcacacaccacactcgatgaccccatcaaatgctacagcccccaggtcttctaccccctcccatggccaaactactgccacagagcccacacctgctcagaagactccagccaaagtggtgtacgtgttttctactgagatggccaataaagctgcagaagctgttttgaagggccaggttgaaactatcgtctctttccacatccagaacatttctaacaacaagacagagagaagcacagcgcctctgaacacacagatatctgcccttcggaatgatccgaaacctctcccacaacagcccccagctccggccaaccaggaccagaattcttcccagaataccagactgcagccaactccacccattccggcaccagcacccaagcctgccgcacccccacgtcccctggaccgggagagtcctggggtagaaaacaaactgattccttctgtaggaagtcctgccagctccactccactgcccccagatggtactgggcccaactcaactcccaacaatagggcagtgacccctgtctcccaggggagcaatagctcttcagcagatcccaaagcccctccgcctccaccagtgtccagtggcgagccccccacactgggagagaatcccgatggcctatctcaggagcagctggagcaccgggagcgctccttacaaactctcagagatatccagcgcatgctttttcctgatgagaaagaattcacaggagcacaaagtgggggaccgcagcagaatcctggggtattagatgggcctcagaaaaaaccagaagggccaatacaggccatgatggcccaatcccaaagcctaggtaagggacctgggccccggacagacgtgggagctccatttggccctcaaggacatagagatgtacccttttctccagatgaaatggttccaccttctatgaactcccagtctgggaccataggacccgaccaccttgaccatatgactcccgagcagatagcgtggctgaaactgcagcaggagttttatgaagagaagaggaggaagcaggaacaagtggttgtccagcagtgttccctccaggacatgatggtccatcagcacgggcctcggggagtggtccgaggacccccccctccataccagatgacccctagtgaaggctgggcacctgggggtacagagccattttctgatggtatcaacatgccacattctctgcccccgaggggcatggctccccaccccaacatgccagggagccagatgcgcctccctggatttgcaggcatgataaactctgaaatggaagggccgaatgtccccaaccctgcatctagaccaggtctttctggagtcagttggccagatgatgtgccaaaaatcccagatggtcgaaattttcctcctggccagggcattttcagcggtcctggccgaggggaacgcttcccaaacccccaaggattgtctgaagagatgtttcagcagcagctggcagagaaacagctgggtctccccccagggatggccatggaaggcatcaggcccagcatggagatgaacaggatgattccaggctcccagcgccacatggagcctgggaataaccccattttccctcgaataccagttgagggccctctgagtccttctaggggtgactttccaaaaggaattcccccacagatgggccctggtcgggaacttgagtttgggatggttcctagtgggatgaagggagatgtcaatctaaatgtcaacatgggatccaactctcagatgatacctcagaagatgagagaggctggggcgggccctgaggagatgctgaaattacgcccaggtggctcagacatgctgcctgctcagcagaagatggtgccactgccatttggtgagcacccccagcaggagtatggcatgggccccagaccattccttcccatgtctcagggtccaggcagcaacagtggcttgcggaatctcagagaaccaattgggcccgaccagaggactaacagccggctcagtcatatgccaccactacctctcaacccttccagtaaccccaccagcctcaacacagctcctccagttcagcgcggcctggggcggaagcccttggatatatctgtggcaggcagccaggtgcattccccaggcattaaccctctgaagtctcccacgatgcaccaagtccagtcaccaatgctgggctcgccctcggggaacctcaagtccccccagactccatcgcagctggcaggcatgctggcgggcccagctgctgctgcttccattaagtccccccctgttttggggtctgctgctgcttcacctgtccacctcaagtctccatcacttcctgccccgtcacctggatggacctcttctccaaaacctccccttcagagtcctgggatccctccaaaccataaagcacccctcaccatggcctccccagccatgctgggaaatgtagagtcaggtggccccccacctcctacagccagccagcctgcctctgtgaatatccctggaagtcttccctctagtacaccttataccatgcctccagagccaaccctttcccagaacccactctctattatgatgtctcgaatgtccaagtttgcaatgcccagttccaccccgttataccatgatgctatcaagactgtggccagctcagatgacgactcccctccagctcgttctcccaacttgccatcaatgaataatatgccaggaatgggcattaatacacagaatcctcgaatttcaggtccaaaccccgtggttccgatgccaaccctcagcccaatgggaatgacccagccactttctcactccaatcagatgccctctccaaatgccgtgggacccaacatacctcctcatggggtcccaatggggcctggcttgatgtcacacaatcctatcatggggcatgggtcccaggagccaccgatggtacctcaaggacggatgggcttcccccagggcttccctccagtacagtctcccccacagcaggttccattccctcacaatggccccagtggggggcagggcagcttcccaggagggatgggtttcccaggagaaggcccccttggccgccccagcaacctgccccaaagttcagcagatgcagcactttgcaagcctggaggccccgggggtcctgactccttcactgtcctggggaacagcatgccttcggtgtttacagacccagatctgcaggaggtcatccgacctggagccaccggaatacctgagtttgatctatcccgcattattccatctgagaagcccagccagacgctgcaatatttccctcgaggggaagttccaggccgtaaacagccccagggtcctggacctgggttttcacacatgcaggggatgatgggcgaacaagcccccagaatgggactagcattacctggcatgggaggtccagggccagtgggaactccggacatccctcttggtacagctccatccatgccaggccacaaccccatgagaccaccagcctttctccaacaaggcatgatgggacctcaccatcggatgatgtcaccagcacaatctacaatgcccggccagcccaccctgatgagcaatccagctgctgccgtgggcatgattcctggcaaggatcgggggcctgccgggctctacacccaccctgggcctgtgggctctccaggcatgatgatgtccatgcagggcatgatgggaccccaacagaacatcatgatccccccacagatgaggccccggggcatggctgctgacgtgggcatgggtggatttagccaaggacctggcaacccaggaaacatgatgttttaagctgctaagatgggatgtgccgatccttgtcaaaatgagattccaggtcctgagagctgctttgaggcagttccaggagtacttactattggtcatgcaataggagaacagagacccgagggctgctttgggggaggggggaactcgagaatgtatggatttacctgaaaacaaattattcatttaatcaacaggtgtgttttttttaagatttattttttaaaaattatttttgtggacttgggtatcaatgatggcacctacttttgggaatctgtagctgtgctttgagaattgccatcggtcatgtgttgcaccgttctctgtatgtttacgtcctttggactggcttctcccaggattcttttctgtttttgtttttttgatttgggctttatttttttctgtgtactgtactatattgtaaaagggattttagcagagactttagtctttggggcaagaggagaacaggaatgctgggctgtttactttaggtggagaatccatcttcagacctttggactattttctttcaactgcagtgtatagaaaaaccaaactacgacctcagagcagagtattaatgaaaagcacaaaaaaaggaactaagttcagcgaggggtggggggaggggggagatttttcttttgaaaaataatgactcttaggacatttgtttttcagttcaagtgctcttcagcactgtcttgtctcccaatataccaacccactggcacatttttctcttgttttctctctccgattttgctctgtctcctcagttaagtgtttccttcctttgtgccccccgctggtgaccctctgcttccctctctctttccctttggcagctgcaatacacagtgttattctggggaaataaatctagcaaagcctcgccttccatgccgagcgtcctcttggctctgagagggaaaggtctgtccttgggatgctctctggtcttttttccccctaagtctttctctttcccatcatacccttccctgcccaccttgttttctgttctccttttattaggaattcccaagtgaattttattaatgtgggagtggaacagatgctaaaagctatccaggattttgtttctgtttgttttaaattttgtggttccttccctttcctccccctcccatgcgtaagacgttctgtgtaacctccattaaatttggtacaaaaccactcgccagagctgtggtgtcagaaaaataaaatatattgtttcttacaaaa

SEQ ID NO: 33 - DNA, 8413 bp, Homo sapiens
tttccagattggggctcgggccgcgcctcctccgggaccctccccttggaccgagccgatcgccgcggggcagttcgggccggctgtcctggcgcgaaaaggtggacaagtcctattttcaagagaagatgacttttaacagttttgaaggatctaaaacttgtgtacctgcagacatcaataaggaagaagaatttgtagaagagtttaatagattaaaaacttttgctaattttccaagtggtagtcctgtttcagcatcaacactggcacgagcagggtttctttatactggtgaaggagataccgtgcggtgctttagttgtcatgcagctgtagatagatggcaatatggagactcagcagttggaagacacaggaaagtatccccaaattgcagatttatcaacggcttttatcttgaaaatagtgccacgcagtctacaaattctggtatccagaatggtcagtacaaagttgaaaactatctgggaagcagagatcattttgccttagacaggccatctgagacacatgcagactatcttttgagaactgggcaggttgtagatatatcagacaccatatacccgaggaaccctgccatgtatagtgaagaagctagattaaagtcctttcagaactggccagactatgctcacctaaccccaagagagttagcaagtgctggactctactacacaggtattggtgaccaagtgcagtgcttttgttgtggtggaaaactgaaaaattgggaaccttgtgatcgtgcctggtcagaacacaggcgacactttcctaattgcttctttgttttgggccggaatcttaatattcgaagtgaatctgatgctgtgagttctgataggaatttcccaaattcaacaaatcttccaagaaatccatccatggcagattatgaagcacggatctttacttttgggacatggatatactcagttaacaaggagcagcttgcaagagctggattttatgctttaggtgaaggtgataaagtaaagtgctttcactgtggaggagggctaactgattggaagcccagtgaagacccttgggaacaacatgctaaatggtatccagggtgcaaatatctgttagaacagaagggacaagaatatataaacaatattcatttaactcattcacttgaggagtgtctggtaagaactactgagaaaacaccatcactaactagaagaattgatgataccatcttccaaaatcctatggtacaagaagctatacgaatggggttcagtttcaaggacattaagaaaataatggaggaaaaaattcagatatctgggagcaactataaatcacttgaggttctggttgcagatctagtgaatgctcagaaagacagtatgcaagatgagtcaagtcagacttcattacagaaagagattagtactgaagagcagctaaggcgcctgcaagaggagaagctttgcaaaatctgtatggatagaaatattgctatcgtttttgttccttgtggacatctagtcacttgtaaacaatgtgctgaagcagttgacaagtgtcccatgtgctacacagtcattactttcaagcaaaaaatttttatgtcttaatctaactctatagtaggcatgttatgttgttcttattaccctgattgaatgtgtgatgtgaactgactttaagtaatcaggattgaattccattagcatttgctaccaagtaggaaaaaaaatgtacatggcagtgttttagttggcaatataatctttgaatttcttgatttttcagggtattagctgtattatccattttttttactgttatttaattgaaaccatagactaagaataagaagcatcatactataactgaacacaatgtgtattcatagtatactgatttaatttctaagtgtaagtgaattaatcatctggattttttattcttttcagataggcttaacaaatggagctttctgtatataaatgtggagattagagttaatctccccaatcacataatttgttttgtgtgaaaaaggaataaattgttccatgctggtggaaagatagagattgtttttagaggttggttgttgtgttttaggattctgtccattttcttttaaagttataaacacgtacttgtgcgaattatttttttaaagtgatttgccatttttgaaagcgtatttaatgatagaatactatcgagccaacatgtactgacatggaaagatgtcaaagatatgttaagtgtaaaatgcaagtggcaaaacactatgtatagtctgagccagatcaaagtatgtatgtttttaatatgcatagaacaaaagatttggaaagatatacaccaaactgttaaatgtggtttctcttcggggagggggggattgggggaggggccccagaggggttttataggggccttttcactttctacttttttcattttgttctgttcgaattttttataagtatgtattacttttgtaatcagaatttttagaaagtattttgctgatttaaaggcttaggcatgttcaaacgcctgcaaaactacttatcactcagctttagtttttctaatccaagaaggcagggcagttaacctttttggtgccaatgtgaaatgtaaatgattttatgtttttcctgctttgtggatgaaaaatatttctgagtggtagttttttgacaggtagaccatgtcttatcttgtttcaaaataagtatttctgattttgtaaaatgaaatataaaatatgtctcagatcttccaattaattagtaaggattcatccttaatccttgctagtttaagcctgcctaagtcactttactaaaagatctttgttaactcagtattttaaacatctgtcagcttatgtaggtaaaagtagaagcatgtttgtacactgcttgtagttatagtgacagctttccatgttgagattctcatatcatcttgtatcttaaagtttcatgtgagtttttaccgttaggatgattaagatgtatataggacaaaatgttaagtctttcctctacctacatttgttttcttggctagtaatagtagtagatacttctgaaataaatgttctctcaagatccttaaaacctcttggaaattataaaaatattggcaagaaaagaagaatagttgtttaaatattttttaaaaaacacttgaataagaatcagtagggtataaactagaagtttaaaaatgcttcatagaacgtccagggtttacattacaagattctcacaacaaacctattgtagaggtgagtaaggcatgttactacagaggaaagtttgagagtaaaactgtaaaaaattatatttttgttgtactttctaagagaaagagtattgttatgttctcctaacttctgttgattactactttaagtgatattcatttaaaacattgcaaatttattttatttatttaattttctttttgagatggagtcttgcttgtcacccaggctggagtgcagtggagtgatctctgctcactgcaacctccgccttctgggttcaagcgattctcgtgcctcagcttcctgagtagctggaattacaggcaggtgccaccatgcccgactaatttttttttatttttagtagagacggggtttcaccatgttggccaggctggtatcaaactcctgacctcaagagatccactcgccttgccctcccaaagtgctgggattacaggcttgagccaccacgcccggctaaaacattgcaaatttaaatgagagttttaaaaattaaataatgactgccctgtttctgttttagtatgtaaatcctcagttcttcacctttgcactgtctgccacttagtttggttatatagtcattaacttgaatttggtctgtatagtctagactttaaatttaaagttttctacaaggggagaaaagtgttaaaatttttaaaatatgttttccaggacacttcacttccaagtcaggtaggtagttcaatctagttgttagccaaggactcaaggactgaattgttttaacataaggcttttcctgttctgggagccgcacttcattaaaattcttctaaaacttgtatgtttagagttaagcaagactttttttcttcctctccatgagttgtgaaatttaatgcacaacgctgatgtggctaacaagtttattttaagaattgtttagaaatgctgttgcttcaggttcttaaaatcactcagcactccaacttctaatcaaatttttggagacttaacagcatttgtctgtgtttgaactataaaaagcaccggatcttttccatctaattccgcaaaaattgatcatttgcaaagtcaaaactatagccatatccaaatcttttccccctcccaagagttctcagtgtctacatgtagactattccttttctgtataaagttcactctaggatttcaagtcaccacttattttacattttagtcatgcaaagattcaagtagttttgcaataagtacttatctttatttgtaataatttagtctgctgatcaaaagcattgtcttaatttttgagaactggttttagcatttacaaactaaattccagttaattaattaatagctttatattgcctttcctgctacatttggttttttcccctgtccctttgattacgggctaaggtagggtagagtgggtgtagtgagtgtatataatgtgatttggccctgtgtattatgatattttgttatttttgttgttatattatttacatttcagtagttgttttttgtgtttccattttagtggataaaatttgtattttgaactatgaatggagactaccgccccagcattagtttcacatgatataccctttaaacccgaatcattgttttatttcctgattacacaggtgttgaatggggaaaggggctagtatatcagtaggatatactatgggatgtatatatatcattgctgttagagaaatgaaataaaatggggctgggctcagtggctcacgcctgtaatcccagcactttgggaggctgaggcaggtggatcacgaggtcaggagatcgagaccatcctggctaacacggtgaaaccccgtctctactaaaaaacagaaaattagccgggcgtggtggcgggcgcctgtagtcccagctactcgggaggctgaggcaggagaatggtgtgaacccgggaggcagagcttgcagtgagccgagatctcgccactgcactccagcctgggcaacagagcaagactctgtctcaaaaaaaaaaaaaaaagaaataagaaaatgggaagcaatatttgacatagttctttttagtcaaatctacttgttaaaaaaagggtagcagtttattcatctgtgaaaggaaaataatacttatcttacaaggttgcaagagctcaaggagaccatgtatgtaaagttcctgctgtaaatatgaactcccatcctaatacccttttacctctctgtgggtttgtcttgacctggaaatttgggctaaaacttagaaaaaattcttacatgataactcagtgatgcttactcatagtttttggtgtttctcatagataagatataaatcagctgggcgcggtggctcatgcctgtaatcccagcactttgggaggccgaggcgggcagatcacctgaggtcgggaggtcgagaccagcctgaccaacatggagaaaccccgtctctactaaaaatacaaaattagctgggcgtggtggctcatgcctgtaatcccagctacttgggaggctgaggcaggagaatcgcttgaacccaggaggcggaggttgtggtgagcgaagatcgtgccattgcactccagcctgggcaacaagagcaaaactctgtctcaaaaaaaaaaaaagatataaatcacaataaataaataggtcaatacaaatgttagccaggcgtggtggcacatgcccatagtcgcagctactctggaggcagaggcaggaggatcacttgagcccatgaatttgaggcagcagtgagctatgattgtgccactgtactccagtctgggtgacagagtgagaccccatctctaaataaataggtcaaacccttaaaaatatttaaattcttaaaaaattgaaaagattattcttctcaaatttagttgagctttctaagagaagcaattggctttttcccacttcaataatcattttcagtttgactcatacagttaacacaatgtgaatttcttcctcagcataacagagttatagaatgacagggctggaagtgaccttagagagtatccagttctttcattttacaggtgaggcaactgagactcaaaggtgatgtaatttgtgcaaagattatagctaattagtagcagagccctgactgggacatagtttgaaggtgaaaaacttcaccaagctacctttcttgaaaggtccaaatgtttatgttttcaactactctttccactgtaccataactttcactacatattaaatgacactttataactaatataataggacaatcatcaatgcatatatagccagcccttcatatctgtgggttttgcatccatggattcaaccaaggaggaattgaaaacactgagaaaaaaaaaaaagaccacacaataaaaaaaaaaaatacaaaataatacaaagaaaaagccaaaattgtcatactgttgttaagcaacagtataacaactatttacatagcattaaggttggtgcaaaaatgcaaaaaaaaaaaaagcaattatttttaaaccaacctaatatattgtattaggtattaaagtcatctggacatgaattaaagtatatgatgccagcctggacaaaaggcaaaaccctgtctctacaaaaaatacaaaaattagctgggcatggtggtgtgtgcctgtagtcctggctactccggagcctgaggtgggaggatcgcttgagtctgggaggcagaggctgcattgagctatgatcatggcactgcattccagcctgggtgacagtgcaagaccttgtctcagaataaataaagtatgtgatgaagatgtgcatacattatatgcaaatactgttttttttttttttaatttaaacagtctcactgtgttgcccaggatggagtgcaatggcacaatcttggctcatggcaaactctgcctcgcaagcagctgggactacaggcatgctccacggtgcccagttaattttttttgtattcttagtagagacagggtttcaccatgttggccaggctagtcttgaatttctgacctcaagtgattcatctcccaaagtgctgggattacaggcgtgagccaccacggccggctaatttttgtattttttagtagtgactggtttcgcggtgttgaccaggctggtctcgaactcctgatctcaggtgatctgcctgcctcggcctcacaaagtgctgggattacaggtgtgaaccactgctcccggccttgtgtgattttatctaagggacttaagcgtcctcaggtcctagggggtcgtgaaaccaaaaccccagggatagcaagggacaattgtatcttcaaagtagacaaatggcgccgggcacggtggctcacgcctgtaatcccagcagtttccgaggctgaggcaggcggctcacctgaggtcaggagttggagaccagcctggccaacatgctgaaaccctgtctgtacaaaaatacaaaaatagctgggcatggtggcgcatgcctgtagtcccagctactagagcgactgaggcaggagaattgcttgaacctgggaggcggaggttgcagggagccaagatggcgccaccgcactccagcctaggtgatagagtgagactccctctcaaaaacaaaacaaaacaaaaaaattagacaaatgctacattaatgtttgggtggtcagattctactttgaatctgaagtttgcagatatgcctatagatttttggagtttaccactttcttattctgtatcattaatgtaatattttaaattactatatatgttaccatttttctggatttagtaagaaatttgcagttttggtttgatgtaacaagggttttaatgtaatttatgttagattttgcatttttttcattactgttatattttaacctgactgactgatctaattgtattagtattgtgaataatcatgtgaaatgttttgagacagagtactatatttgtgaatataattttatggtttttttcacttagaacctttctgtgtggaaaactaagaaaattgctttctgctgtataatctggcattcattgtagattaaagcttatttttctgtgaataaaacgtattcaataaaatactattctttaaaatta

SEQ ID NO: 34 - DNA, 2655 bp, Homo sapiens
cccagaaggccgcggggggtggaccgcctaagagggcgtgcgctcccgacatgccccgcggcgcgccattaaccgccagatttgaatcgcgggacccgttggcagaggtggcggcggcggcatgggtgccccgacgttgccccctgcctggcagccctttctcaaggaccaccgcatctctacattcaagaactggcccttcttggagggctgcgcctgcaccccggagcggatggccgaggctggcttcatccactgccccactgagaacgagccagacttggcccagtgtttcttctgcttcaaggagctggaaggctgggagccagatgacgaccccatagaggaacataaaaagcattcgtccggttgcgctttcctttctgtcaagaagcagtttgaagaattaacccttggtgaatttttgaaactggacagagaaagagccaagaacaaaattgcaaaggaaaccaacaataagaagaaagaatttgaggaaactgcggagaaagtgcgccgtgccatcgagcagctggctgccatggattgaggcctctggccggagctgcctggtcccagagtggctgcaccacttccagggtttattccctggtgccaccagccttcctgtgggccccttagcaatgtcttaggaaaggagatcaacattttcaaattagatgtttcaactgtgctcttgttttgtcttgaaagtggcaccagaggtgcttctgcctgtgcagcgggtgctgctggtaacagtggctgcttctctctctctctctcttttttgggggctcatttttgctgttttgattcccgggcttaccaggtgagaagtgagggaggaagaaggcagtgtcccttttgctagagctgacagctttgttcgcgtgggcagagccttccacagtgaatgtgtctggacctcatgttgttgaggctgtcacagtcctgagtgtggacttggcaggtgcctgttgaatctgagctgcaggttccttatctgtcacacctgtgcctcctcagaggacagtttttttgttgttgtgtttttttgtttttttttttttggtagatgcatgacttgtgtgtgatgagagaatggagacagagtccctggctcctctactgtttaacaacatggctttcttattttgtttgaattgttaattcacagaatagcacaaactacaattaaaactaagcacaaagccattctaagtcattggggaaacggggtgaacttcaggtggatgaggagacagaatagagtgataggaagcgtctggcagatactccttttgccactgctgtgtgattagacaggcccagtgagccgcggggcacatgctggccgctcctccctcagaaaaaggcagtggcctaaatcctttttaaatgacttggctcgatgctgtgggggactggctgggctgctgcaggccgtgtgtctgtcagcccaaccttcacatctgtcacgttctccacacgggggagagacgcagtccgcccaggtccccgctttctttggaggcagcagctcccgcagggctgaagtctggcgtaagatgatggatttgattcgccctcctccctgtcatagagctgcagggtggattgttacagcttcgctggaaacctctggaggtcatctcggctgttcctgagaaataaaaagcctgtcatttcaaacactgctgtggaccctactgggtttttaaaatattgtcagtttttcatcgtcgtccctagcctgccaacagccatctgcccagacagccgcagtgaggatgagcgtcctggcagagacgcagttgtctctgggcgcttgccagagccacgaaccccagacctgtttgtatcatccgggctccttccgggcagaaacaactgaaaatgcacttcagacccacttatttctgccacatctgagtcggcctgagatagacttttccctctaaactgggagaatatcacagtggtttttgttagcagaaaatgcactccagcctctgtactcatctaagctgcttatttttgatatttgtgtcagtctgtaaatggatacttcactttaataactgttgcttagtaattggctttgtagagaagctggaaaaaaatggttttgtcttcaactcctttgcatgccaggcggtgatgtggatctcggcttctgtgagcctgtgctgtgggcagggctgagctggagccgcccctctcagcccgcctgccacggcctttccttaaaggccatccttaaaaccagaccctcatggctaccagcacctgaaagcttcctcgacatctgttaataaagccgtaggcccttgtctaagtgcaaccgcctagactttctttcagatacatgtccacatgtccatttttcaggttctctaagttggagtggagtctgggaagggttgtgaatgaggcttctgggctatgggtgaggttccaatggcaggttagagcccctcgggccaactgccatcctggaaagtagagacagcagtgcccgctgcccagaagagaccagcaagccaaactggagcccccattgcaggctgtcgccatgtggaaagagtaactcacaattgccaataaagtctcatgtggttttatctaaaaaaaaaaaaaaaaaaaaaaaaa

SEQ ID NO: 35 - DNA, 1790 bp, Homo sapiens
gagggaggggccgccggggaagaggaggaggaaggaaagaaagaaagcgagggagggaaagaggaggaaggaagatgcgagaaggcagaggaggagggagggagggaaggagcgcggagcccggcccggaagctaggagccattccgtagtgccatcccgagcaacgcactgctgcagcttccctgagcctttccagcaagtttgttcaagattggctgtcaagaatcatggactgttattatatgccttgttttctgtcaagacaccatgattcctggtaaccgaatgctgatggtcgttttattatgccaagtcctgctaggaggcgcgagccatgctagtttgatacctgagacggggaagaaaaaagtcgccgagattcagggccacgcgggaggacgccgctcagggcagagccatgagctcctgcgggacttcgaggcgacacttctgcagatgtttgggctgcgccgccgcccgcagcctagcaagagtgccgtcattccggactacatgcgggatctttaccggcttcagtctggggaggaggaggaagagcagatccacagcactggtcttgagtatcctgagcgcccggccagccgggccaacaccgtgaggagcttccaccacgaagaacatctggagaacatcccagggaccagtgaaaactctgcttttcgtttcctctttaacctcagcagcatccctgagaacgaggcgatctcctctgcagagcttcggctcttccgggagcaggtggaccagggccctgattgggaaaggggcttccaccgtataaacatttatgaggttatgaagcccccagcagaagtggtgcctgggcacctcatcacacgactactggacacgagactggtccaccacaatgtgacacggtgggaaacttttgatgtgagccctgcggtccttcgctggacccgggagaagcagccaaactatgggctagccattgaggtgactcacctccatcagactcggacccaccagggccagcatgtcaggattagccgatcgttacctcaagggagtgggaattgggcccagctccggcccctcctggtcacctttggccatgatggccggggccatgccttgacccgacgccggagggccaagcgtagccctaagcatcactcacagcgggccaggaagaagaataagaactgccggcgccactcgctctatgtggacttcagcgatgtgggctggaatgactggattgtggccccaccaggctaccaggccttctactgccatggggactgcccctttccactggctgaccacctcaactcaaccaaccatgccattgtgcagaccctggtcaattctgtcaattccagtatccccaaagcctgttgtgtgcccactgaactgagtgccatctccatgctgtacctggatgagtatgataaggtggtactgaaaaattatcaggagatggtagtagagggatgtgggtgccgctgagatcaggcagtccttgaggatagacagatatacacaccacacacacacaccacatacaccacacacacacgttcccatccactcacccacacactacacagactgcttccttatagctggacttttatttaaaaaaaaaaaaaaaaaaatggaaaaaatccctaaacattcaccttgaccttatttatgactttacgtgcaaatgttttgaccatattgatcatatattttgacaaaatatatttataactacgtattaaaagaaaaaaataaaatgagtcattattttaaaggt

SEQ ID NO: 36 - DNA, 6013 bp, Homo sapiens
taagagagggcggggggaaggaagaggaggcgggatccgggcgctgcgttggctgcggcctggcaccaaaggggcggccccggcggagagcggacccagtggcctcggcgattatggacccggccgaggcggtgctgcaagagaaggcactcaagtttatgaattcctcagagagagaagactgtaataatggcgaaccccctaggaagataataccagagaagaattcacttagacagacatacaacagctgtgccagactctgcttaaaccaagaaacagtatgtttagcaagcactgctatgaagactgagaattgtgtggccaaaacaaaacttgccaatggcacttccagtatgattgtgcccaagcaacggaaactctcagcaagctatgaaaaggaaaaggaactgtgtgtcaaatactttgagcagtggtcagagtcagatcaagtggaatttgtggaacatcttatatcccaaatgtgtcattaccaacatgggcacataaactcgtatcttaaacctatgttgcagagagatttcataactgctctgccagctcggggattggatcatattgctgagaacattctgtcatacctggatgccaaatcactatgtgctgctgaacttgtgtgcaaggaatggtaccgagtgacctctgatggcatgctgtggaagaagcttatcgagagaatggtcaggacagattctctgtggagaggcctggcagaacgaagaggatggggacagtatttattcaaaaacaaacctcctgacgggaatgctcctcccaactctttttatagagcactttatcctaaaattatacaagacattgagacaatagaatctaattggagatgtggaagacatagtttacagagaattcactgccgaagtgaaacaagcaaaggagtttactgtttacagtatgatgatcagaaaatagtaagcggccttcgagacaacacaatcaagatctgggataaaaacacattggaatgcaagcgaattctcacaggccatacaggttcagtcctctgtctccagtatgatgagagagtgatcataacaggatcatcggattccacggtcagagtgtgggatgtaaatacaggtgaaatgctaaacacgttgattcaccattgtgaagcagttctgcacttgcgtttcaataatggcatgatggtgacctgctccaaagatcgttccattgctgtatgggatatggcctccccaactgacattaccctccggagggtgctggtcggacaccgagctgctgtcaatgttgtagactttgatgacaagtacattgtttctgcatctggggatagaactataaaggtatggaacacaagtacttgtgaatttgtaaggaccttaaatggacacaaacgaggcattgcctgtttgcagtacagggacaggctggtagtgagtggctcatctgacaacactatcagattatgggacatagaatgtggtgcatgtttacgagtgttagaaggccatgaggaattggtgcgttgtattcgatttgataacaagaggatagtcagtggggcctatgatggaaaaattaaagtgtgggatcttgtggctgctttggacccccgtgctcctgcagggacactctgtctacggacccttgtggagcattccggaagagtttttcgactacagtttgatgaattccagattgtcagtagttcacatgatgacacaatcctcatctgggacttcctaaatgatccagctgcccaagctgaacccccccgttccccttctcgaacatacacctacatctccagataaataaccatacactgacctcatacttgcccaggacccattaaagttgcggtatttaacgtatctgccaataccaggatgagcaacaacagtaacaatcaaactactgcccagtttccctggactagccgaggagcagggctttgagactcctgttgggacacagttggtctgcagtcggcccaggacggtctactcagcacaactgactgcttcagtgctgctatcagaagatgtcttctatcttttgtgaatgattggaacttttaaacctcccctcctctcctcctttcacctctgcacctagttttttcccattggttccagacaaaggtgacttataaatatatttagtgttttgccagaatctctcttgctttgccattaagcagaagaactagtttccctgtatagcctgctgggagagacccacttctagggtatgggggatgcagcttcaagcccagtgcccagtgtctccctgttaactgcaggaatgccaagcacctggccagagcagcccagccccaatatgcttaggaggagacagagttccctctgtatagcctctgggacaagaaaaagaaaacacaagaatgtatacactggaagatttgggcctcctgcctgccttctctttgtttctgttcctcttcccatctactcccctacgccccttcaaccttttttctctgtctgcttcacctgagaagaaagtgtacgaagagagtgtcctcctctcacatgagccagatcagccagaaaatgcaacacttggaagagttaaatgctgttcagtgaagatttcagccccaggcctttgctgcaagtgaccctgtggcaacagtggattctcagacatgatactctcatcatatttgcaactcttctctctctttcttccccacacccaagaggaggattggtggtagggggcaggcagagggggtggggagaagtttcctgggctccatcaatggctgcatcttttctggactcagcagtctccttgattccatgtagagtgtggaaaggagttgctgattgcatttcctctcattaacaattgggtgtgtaataaaaagcattgtacttcatcttaaatcactggtaaggctcagcctacagaaagatttgaaatggccagagccaatcgcttggtgcattctgcgtaatggtttccatctccgatttcctcatcagggcctgtgaatacccaggtgcctgtatctttgccaagaccgtgatcaaggtagcttaagagagatggtcaggagaaaacactgtttttgttttttttgttgttttgttttgttttggccagttaaatatcatctctcaaatattgatctcaccgtgtcaaccttgcactgcacaaccttccttctgcttctcccacacccagtatttgcagaagggcaaagctgcttaagagagaggatcagggtgaagtttggcacacagggtttattaatggggcaaaaactgccttttcttcctcctcctgaccttattttgctcttcactctccccagccaataaagcgtctgtggcgattggtgaacagcataaacagctggacctcagcaagggtcaggcaaacccagtcactcggaaggcagctgtgtgagctgccaagctagtgggcttcaggtgcaagggtacctgtgccacaccaacctgggagcacacagaatactattaatgtgcacccagctggtctccccaggcaagaaggtatcctcttcccaaggtgtacccactgaatgttgttactacatattgagagtcattttatgcatatgcattctacctttcctgctttatgagtatttttaagcttttagttcaaggttatattcagaaaatatttcccagtataatgatacatcgtagcctaagaaatattttctcaatgtaattcccttcccagctacccaaatgctacagagaaatgttttctacttggccactatcagggttcgtcatctattgtgttgactattaatggctttttgattgggtaaggattttgctatagatgaaggtagagggctgtcagccctgaaaaacacacaggtcagacatttaaaaggcatgggtttcgagctgtctcaaaatattgcccaatagccataattttaccagcctttctgtcatatgctgctattacaaagtggaagctgttgaatgtttattggtgcccagggttttgctctccaatctaggttcagttgaaggaatattgtttctaagactgttttgagacatgtccagtacatcacaaaggagatcggggcgacccctgcagatgtggagccattagcccagttgaggatattctccaagttgtcctctctcctgctgatggaaatgggaatgaagttaagtggtctgaaaaacttgaatcgttcacatttctcagctctgggggtcatttaccagtttgttgtagaagaaataatcaggtaagttaaaagttcatttccagagaaggtaaaccccacttaccatctctgcatgatttcagtgggaattgattatcactaatccccaactgggctagaataaatgtaaagtttgacctttttaaaacgaaaagagagacaaagtctcagcacattccaaggagtggtagaaacagagctgaaggtgtccccattgtagattagtctcttctcactaaaatttactttccaacgtagggcctaaaggaaacctttcttaaagacaggctgaaaccccttcaaaggcagatgaggaggtacagacacgtgaccttttggtgcacactggagctacttggacaagaccagcatgccttgctgcacgtgtgtgtatttcactgctgagaacatcctttaacttggtgtgcaatttgaaaggatgtgaatcatggatggaaggccatttgtacatgtcccttggcaaaattctttctggtgtctcctaacttcagagacagggactctttttggatctctattgacaagtaataaaagtctggccctcataacttgtttccgaactagaaaagtctgtgagacccctacatcattctggtttttttgcttgagtaagaacaatccttttttatttttcttctgtacagtctaaagctacagagaaaaaaaaatgcactcttcccttgccggctcctggtaccattggtctgaacagctgtagttggtctactccttacttagcacttgattgtgtggggaaacaaaggtgggaggggtggggaatactggaaataatcagggcaatttttttctttcccataattggactagataccttggtactgttgaccttctcagcatctcccttttgccttagatggcaacaccctccagtctgtagcagagcagtccaacccagattagtgcagcccggaggcttagggtgcagcctccctggtcttcctccacacagttgttcaccaacagaccagacctcctttaaccacagtgtcaacatagtatcggaaagagagccatttcttaggggaataaaacagtttcgcttctttagctcatctgtggtgtcagaatccttggagctgaagagagaaatcaaaagagcatgatgatggctgcctggtttcaggtggaacttaatgcattgatctttagaagctccttctgttggaagttgagtacctgtgatctaaaatgtcctggaggcagatgacatctaaaatatgtgctttccaaccagcacagctggcgctcttagctcctgattggttgtgtgttttattaaggatcagtgcagttaagtcgtattttaaagtgttacctcccctcctaacccttccccttcttggacactgaaggaaaaggccaactagggtgttagccctctgggcaccaaggaaactaacagctttctcaaagcggtgaccactcaggccagcccagacaaatctgagggatggccagtgcactccaatgatgggacaggcctaacaacacatgtaagcttccccgagagctttcagctggttcacctctttgttctctagactcttaagtactgactgctttgacttttgtgattatgttatggtgatgtgtagtcagtgtaccaatatgttcacaacctaggatcatgataatggagtgtgttttgggttttttttaactgttcagaaaaaaagtaaattacaaatataagattaaagtgaa

SEQ ID NO: 37 - DNA, 2875 bp, Homo sapiens
agaccgcggtgacgtctccaccgcgccaaactcactgaaaatcaaaccgctaccattaggagccctccacgcttaacatatccgttctttctcgtttgaaagtaaccaggctgctcctccccatttttcgccttcttctcgcggaggctgagagactaaccttacacaacatggcggcctggtgtgtctggtgtcctagagcggacgaaagcaggtgactctctagtcaacttccgacttggactccgaagatcgctacagaaagatctagaagaggtaaaggtgttgctggaaaaggctactaggaaaagagtacgtgatgcccttacagctgaaaaatccaagattgagacagaaatcaagaacaagatgcaacagaaatcacagaagaaagcagaacttcttgataatgaaaaaccagctgctgtggttgctcccattacaacgggctatacggtgaaaatcagtaattatggatgggatcagtcagataagtttgtgaaaatctacattaccttaactggagttcatcaagttcccactgagaatgtgcaggtgcatttcacagagaggtcatttgatcttttggtaaagaatctaaatgggaagagttactccatgattgtgaacaatctcttgaaacccatctctgtggaaggcagttcaaaaaaagtcaagactgatacagttcttatattgtgtagaaagaaagtggaaaacacaaggtgggattacctgacccaggttgaaaaggagtgcaaagaaaaagagaagccctcctatgacactgaaacagatcctagtgagggattgatgaatgttctaaagaaaatttatgaagatggagacgatgatatgaagcgaaccattaataaagcctgggtggaatcaagagagaagcaagccaaaggagacacggaattttgagactttaaagtcgttttgggaactgtgatgtgatgtggaaatactgatgtttccagtaagggaatattggtgagctgcatatataaatttgacagatagctatttacatagccttctaagtaaaggcaatgaattctccatttcctactggaggatttatttaaataaaatatgcttattaaacactcctgcaaagatggttttattagtaccctggtcattttgttcaaggaagggttatattgcattctcacgtgaaatataaaaagcaagtcttgcccaataaaaacgctacattgtgtgtattttttgttcagctaagaattggaaaagtatttgcttgccttttaagttactgacatcagcttccaccagtgtaaaaattgagtaaaacctgaagttttgcataaaatgcaaatcggtgcctgtgcttgaaggttgctgtagagcatctgaccccttattaccaccttaagcaatgtatatgccatgcattaccatgcactaattcaatcacaggtgtttctatctagatttaaatatatttgtcaatgaatgtggaatagaaaatctaaacatgacaataatagacatatctttgtatggtaccagttagttttgccgtggatcagatggtttataaaagtaataaccataaagcaaaaaataatttgaaagcccgtctattcctatgctcaataaagttaagtttttcttcattagaacagttttatgatttatttgtctaggagtatgtcagaaaaatcaggcttttagtaggaattactcctattccccctgaagtcaggaccagtgcctgtgatctccattactttattttcctggaggtattagccaacacagttagatcagagaaagcaattgaagccaggcatgaaggctggcgcccgtaatcccagctactaaggctggaggatcacttcagcccaggagtttaaggctgcagtgagctatgatgatgccactgtactgcagcttgggtaacagattgagaacctgtctcattaaaaaaaaaaaaaaaaaaaaagccgttagacacacaggaaaaatccagaagggtaaactaaactaaagctacaattaatatgggaatttggaagaagtggtaggatttaaaatacagaaacagtttatgtataggatagctataagtaaatactgaaacacattatgcctctgtaattggggttgacacatgaacagaatagcagacacaatgcatatgaaagttacagaatatggtaaaagtggggtaaagatgggtttttaatgatactaagataactgaaaataggcatatagatatattccaagccgcctgacgatctaattgtaaaaagtaaagcatacaaatactagaagaaaatggaggaaaacgacattatatgtgacttaaaacctagaagaaataaataaaactattgatcaattttaactacataaaaatgtttataggacaagaaaaaccccaccataacccaaggcaaacaatgtattgacaggattccaataattaagaatacttcatacaaaaagaaatgtaaatgacctttaacatgtaaagatgctcaccttgttcagaagagaataaaccagtgtttttacctttcacttgaaaaagaagtataaaaacaactgtattgagttgaggctgtggagaaataaggacacatatatgggaatggaatgcaaaagttaaactttggttaacaagaatatttgggcaggtgcagtggctcacacctgtaatcccaacaccttgggaggccaaggtgggcggatcacttgaggtcaggagttcaagaccatctggccaacatggtgaaaccctgtctctactgaaaataaaaaaaactagctgggcatggtggcagatgcctgtaactccagctactcgggagactgaaggacaagaatcacttgaacc

SEQ ID NO: 38 - DNA, 4836 bp, Homo sapiens
agaagccccgggctcgtcagtcaaaccggttctctgtttgcactcggcagcacgggcaggcaagtggtccctaggttcgggagcagagcagcagcgcctcagtcctggtcccccagtcccaagcctcacctgcctgcccagcgccaggatggccaccatcacctgcacccgcttcacggaagagtaccagctcttcgaggaattgggcaagggagccttctcggtggtgcgaaggtgtgtgaaggtgctggctggccaggagtatgctgccaagatcatcaacacaaagaagctgtcagccagagaccatcagaagctggagcgtgaagcccgcatctgccgcctgctgaagcaccccaacatcgtccgactacatgacagcatctcagaggagggacaccactacctgatcttcgacctggtcactggtggggaactgtttgaagatatcgtggcccgggagtattacagtgaggcggatgccagtcactgtatccagcagatcctggaggctgtgctgcactgccaccagatgggggtggtgcaccgggacctgaagcctgagaatctgttgctggcctccaagctcaagggtgccgcagtgaagctggcagactttggcctggccatagaggtggagggggagcagcaggcatggtttgggtttgcagggactcctggatatctctccccagaagtgctgcggaaggacccgtacgggaagcctgtggacctgtgggcttgtggggtcatcctgtacatcctgctggttgggtaccccccgttctgggatgaggaccagcaccgcctgtaccagcagatcaaagccggcgcctatgatttcccatcgccggaatgggacactgtcaccccggaagccaaggatctgatcaataagatgctgaccattaacccatccaaacgcatcacagctgccgaagcccttaagcacccctggatctcgcaccgctccaccgtggcatcctgcatgcacagacaggagaccgtggactgcctgaagaagttcaatgccaggaggaaactgaagggagccattctcaccacgatgctggccaccaggaacttctccggagggaagagtgggggaaacaagaagagcgatggtgtgaagaaaagaaagtccagttccagcgttcagttaatggaatcctcagagagcaccaacaccaccatcgaggatgaagacaccaaagtgcggaaacaggaaattataaaagtgacagagcagctgattgaagccataagcaatggagattttgagtcctacacgaagatgtgcgaccctggcatgacagccttcgaacctgaggccctggggaacctggttgagggcctggacttccatcgattctattttgaaaacctgtggtcccggaacagcaagcccgtgcacaccaccatcctgaatccccacatccacctgatgggcgacgagtcagcctgcatcgcctacatccgcatcacgcagtacctggacgctggcggcatcccacgcaccgcccagtcggaggagacccgtgtctggcaccgccgggatggcaaatggcagatcgtccacttccacagatctggggcgccctccgtcctgccccactgagggaccaggctggggtcgctgcgttgctgtgccgcagagatccactctgtccgtggagtggagctgctggttctcccaggtggattttgctggaattctcccatgtcatcaccccaccaccgtcacttctgtacctgcatcaagaaaacctgcttgttcacaaaagtcatcgcaacttcagagcgaacggccacatctccccacctctcacccccaccctctcccctgccaggctggggcttcctcaggcatgggtgtccacagcactggccccctctccccagcctcagctgctgtccgcctgatctgtcttgggctgtaggctagaatgcccgggctggtgcccaccaggggctggggagaaggaggggtggcatgatgaggaaggcagcatccgtccgtccctctcccagacctctcctcttccagtgtccccggggaagggcagatgacactcccttccccctaagccaaccgcactgaaggagtggggagaagagcatacgccaggagcctcctgcctcaaagtgctcccctaagtcttcttcctcctgtgctgacctcagggtggtctgacccttccctcggtgtgggggatgtggccctctcaggtgcccctacttgctttctgcttccttctggtgaagtccacctccaacattaacctgcccaccccacccccgtcatccctggagaattccagctttgtcgtatctcagagagggaatctaattgtttttggggggcaaaagaaagcaacgtttaggtatcacttctacttggaccgcatgcctttttatagccaaatttctgtgtatttcgtaaatggatttcgcgttaatggatatttatgtaataactagacttctcagattattgtgagaagggtcaggttggaaggggtgtaggaagaggggtgaggggtagtttttttctgttctagtttttttttttttttttgtcatctctgaggtggaccttgtcacctgtggttattggggccaaggtggactcagctccggggagaagggcctctctgccatttcggtcccaaggtgagctgacacaggcgttccttttgggactgtggaagcatcagatgccagcactgactcaggaacagcaagtcagggcagagaggaggagggaggctgtcaggatggaaatacctggacttttctttgcttccctcgcaaactggggtcttctctaccgaacttcccaggatttcatctcaccatatctgtgtgccgcccccagcaccccccacccacctctggggggcccgtgagcgtgtgtcttcattgcctctctccccttggcgtctgatgaccacagcaaagcactgggaatttctactcttcatgcctcatcctgcagcctcgggttcgcattctctctttcttttcctctttccctctttccctgggattgactctgagtggaataccttggcacatccactaggatctactgtctgcactgttttctttgcatgactttatacgcagtaagtatgttgaaaacaaacaaaaagaagaaaacactcaacaaaaccaatctacatgttttggactaaaaaaaaaaatagaggttgtattctcagtgtccgactcggaattatgttgctgcctctctgtgcttttggcctctgtgtggccgtgttttgccagcatgagatactgtcccctctggaggattttaggggaggaagagccacgtccccagggattggaggaggctccggtaccctcgaccctcctgggtgttggttggagcagaactggtgaggatgtttgatccgagattttctgagctctccccaatcaccagctgtctgctgggttcttttctcaagtcctgctgcccaggcccaggtgagacaggcaacgccaggtctgcaggccaggagagatgctgcccaggcctcctggtttccaagctggtccatcactggcctctgtccttggcagagaccttgctgcccaggcccaggggcaggctcttggcctgccccaggcccagagggcttcccagtaaggcccagtgatcccattatcccaggggcaaaaccacctgtccccttttgagctgccagttccctacagccatccccagtcaagggtgagggtgtggccttcaccaggggctgctgtaattaccgagcaaggtctgagctcttcttcagcctcagttccctcattggttaaaagggttctttgttcccatccagccgatgaaggagcaaacgtctggctatgtgaagcctaatttacctgcaggaactggcagggatagtcactggctggactcctgtttacttctagacctggtcaggctccatcccctcccccacctgcccctgattcccctcgtcggtgcctgtcaactgcttttcagcagtggactgcaggggaaagagcagtgatttggggtgagtaggcttcaattcccagctctgaccagacttgctgtgtgaccttgggcaagttcctttccctctttggagcttggtttccctgccagaggaaactgagctggaggagcctgaggtcctgcctttcattggctgacacacctcctgtccactgtgtcactctccaagtgccagagaagtggaggcagatcgctaccccaggctgagatggcccccactgtgaaggccacgcctgtgggtgggcagccacctggtgccaccacagggcaccagggatgatcctgatgtggcaggcaggggagactcacagaaaaatctgcccagagcctaccctcaccagacaaactctgtgctcctccaaaacatcctttagatgcaaaataataataataataataataaataaataaataaaaatccaaacccaagtcaaaaccttggctccagcatgaaaacacgtttacaggaaagtgttctcctgggtttgtgcccaccatggtgcgaatcctgacccaaggcctcctgtctcccttcaaagggagacccttttgggggatgagtttgccagactccccgtgctggtttctttgttactatttgtttggggttttgttttagttctttttttttttcttttcttttttaaaaatatgtggctgtgaacttgaatgaacactgctcaaactttctgctattggggggggcgggtgggatgggaagaaggggcgtttgttttattcttggtgttttcagtgcaataaatagctacaaacttctgtgc

SEQ ID NO: 39 - DNA, 1949 bp, Homo sapiens
gcggcgcgctcctggcgaggacggagcgagcagatctcgcgtgcgctcgccgcccggcgcagcccagcccggcccccgcctggcgccgcgagccgaggtgtctcccgcgcccgcgcccgtgtcgccgccgtgcccgcgagcgggagccggagtcgccgccgcccgagcgcagccgagcgcacgccgagcccgtccgccgccgccatggccaccacggtgacctgcacccgcttcaccgacgagtaccagctctacgaggatattggcaagggggctttctctgtggtccgacgctgtgtcaagctctgcaccggccatgagtatgcagccaagatcatcaacaccaagaagctgtcagccagagatcaccagaagctggagagagaggctcggatctgccgccttctgaagcattccaacatcgtgcgtctccacgacagcatctccgaggagggcttccactacctggtcttcgatctggtcactggtggggagctctttgaagacattgtggcgagagagtactacagcgaggctgatgccagtcactgtatccagcagatcctggaggccgttctccattgtcaccaaatgggggtcgtccacagagacctcaagccggagaacctgcttctggccagcaagtgcaaaggggctgcagtgaagctggcagacttcggcctagctatcgaggtgcagggggaccagcaggcatggtttggtttcgctggcacaccaggctacctgtcccctgaggtccttcgcaaagaggcgtatggcaagcctgtggacatctgggcatgtggggtgatcctgtacatcctgctcgtgggctacccacccttctgggacgaggaccagcacaagctgtaccagcagatcaaggctggtgcctatgacttcccgtcccctgagtgggacaccgtcactcctgaagccaaaaacctcatcaaccagatgctgaccatcaaccctgccaagcgcatcacagcccatgaggccctgaagcacccgtgggtctgccaacgctccacggtagcatccatgatgcacagacaggagactgtggagtgtctgaaaaagttcaatgccaggagaaagctcaagggagccatcctcaccaccatgctggccacacggaatttctcagcagccaagagtttactcaacaagaaagcagatggagtcaagccccagacgaatagcaccaaaaacagtgcagccgccaccagccccaaagggacgcttcctcctgccgccctggagtcttctgacagtgccaataccaccatagaggatgaagacgctaaagcccggaagcaggagatcattaagaccacggagcagctcatcgaggccgtcaacaacggtgactttgaggcctacgcgaaaatctgtgacccagggctgacctcgtttgagcctgaagcactgggcaacctggttgaagggatggacttccacagattctacttcgagaacctgctggccaagaacagcaagccgatccacacgaccatcctgaacccacacgtgcacgtcattggagaggatgccgcctgcatcgcttacatccggctcacgcagtacattgacgggcagggccggccccgcaccagccagtctgaggagacccgcgtgtggcaccgccgcgacggcaagtggcagaacgtgcacttccactgctcgggcgcgcctgtggccccgctgcagtgaagagctgcgccctggtttcgccggacagagttggtgtttggagcccgactgccctcgggcacacggcctgcctgtcgcatgtttgtgtctgcctcgttccctcccctggtgcctgtgtctgcagaaaaacaagaccagatgtgatttgttaaaaaaaaacaaaaaaaaaaaaaaaaaaaacaagatgacgacgacaaccacaaaaaaaattgacatcagatgaaatgaaaaaa

SEQ ID NO: 40 - DNA, 4054 bp, Homo sapiens
gcggccgctgggctcaggctgtccgctctgggctccgcggcctcggccccgctgcactccacctccgccccctcggactccctcccctctgcttctactcctcctgctccagtgcggatcgtttcgcaactgcttgccactcgtcccgtgcctggctgtttttccatttcccggccccctcttcttgagtactttaccccctgcatttggggacagggactggaaaaggggcgggtggagcgtccagtggagaagaaggaagcgaggcccgcaggaggaggaggatcggcggactgtggggaggagaccccacgccaccctttctggtcatctcccctcccgccccgcccctgcgcacactccctcgcgggcgagctactttcggaccaggaaagtaagagcggccctgggtgacagcgccgcggggccagtcccggggttagccgcgcgtctgctcgcttctggtccgtcgcgctcccagccagggcacagcccggaccgaggatggcttcgaccacaacctgcaccaggttcacggacgagtatcagcttttcgaggagcttggaaagggggcattctcagtggtgagaagatgtatgaaaattcctactggacaagaatatgctgccaaaattatcaacaccaaaaagctttctgctagggatcatcagaaactagaaagagaagctagaatctgccgtcttttgaagcaccctaatattgtgcgacttcatgatagcatatcagaagagggctttcactacttggtgtttgatttagttactggaggtgaactgtttgaagacatagtggcaagagaatactacagtgaagctgatgccagtcattgtatacagcagattctagaaagtgttaatcattgtcacctaaatggcatagttcacagggacctgaagcctgagaatttgcttttagctagcaaatccaagggagcagctgtgaaattggcagactttggcttagccatagaagttcaaggggaccagcaggcgtggtttggttttgctggcacacctggatatctttctccagaagttttacgtaaagatccttatggaaagccagtggatatgtgggcatgtggtgtcattctctatattctacttgtggggtatccacccttctgggatgaagaccaacacagactctatcagcagatcaaggctggagcttatgattttccatcaccagaatgggacacggtgactcctgaagccaaagacctcatcaataaaatgcttactatcaaccctgccaaacgcatcacagcctcagaggcactgaagcacccatggatctgtcaacgttctactgttgcttccatgatgcacagacaggagactgtagactgcttgaagaaatttaatgctagaagaaaactaaagggtgccatcttgacaactatgctggctacaaggaatttctcagcagccaagagtttgttgaagaaaccagatggagtaaaggagtcaactgagagttcaaatacaacaattgaggatgaagatgtgaaagcacgaaagcaagagattatcaaagtcactgaacaactgatcgaagctatcaacaatggggactttgaagcctacacaaaaatctgtgacccaggccttactgcttttgaacctgaagctttgggtaatttagtggaagggatggattttcaccgattctactttgaaaatgctttgtccaaaagcaataaaccaatccacactattattctaaaccctcatgtacatctggtaggggatgatgccgcctgcatagcatatattaggctcacacagtacatggatggcagtggaatgccaaagacaatgcagtcagaagagactcgtgtgtggcaccgccgggatggaaagtggcagaatgttcattttcatcgctcggggtcaccaacagtacccatcaactaaatttcaacagtgccacttctgcattctctgttctcaaggcacctggatggtgaccctgggccgtcctctcctcctcttcatgcatgtttctgagtgcatgaagttgtgaaggtcctacatgtaatgcatatgtgatgcatcatcttatcatatattccttcctatacattgtttacacttcaactacggggatgttccacacaaacttaaattactgttggcaaaacaatagggggagattagacaaaaaaaaaaatccacaatattccaagtacaactcttcatcaagtttctctgttaatgccaagatttaacagacttaagaactattgttctctgaatgacagttgtaagagaaatgtaaattttttagaactctttgctgttaatctgttttggtttgtttggtttttttttttttttttaaggtaaaaaaaaaatacaccttcagtttcctggtgtgatcctggttaaaatggatgatttttcattgaaagttttgctgattaacaattaaagtgggatgatatgtgggcaaaatcacttatgaaagtagaagcaagaatcagttggtttgctaccacataaagccatgctgtttttggtcaaactgtgtaaactggaaaaattcacatcatttctgagtttaatcactttaggatatattcacattgttttggtgaatttgctgaattgaattgtttttctttctcaaatctgtgatctcttttctttatcctgtttctttgttcctttcgtttgctttcttatttttcttttgttccattcttttcttacttttttcccttttccttttttggggaggctggctagtagtgtgtgagaaaagaatagaagtgaaatttgcataatgaatgtaaaagggaaataaaagtcttttgaaggtagctatactagcacttttgatcatcttcagggcccacaaaaatgttgtcaagattttaaaggtttataattctgcttaagctctagtttggacttaggtatcctaactatgttggaggtatttgcattgtttaaagttaggataaaagcaagttcctcctgtgactgcaacgtcttactgattgggacagttgccaggaggataccaacttgatagcagagggggttttatgcaaacgcactcacctccgccttggggaatgaaagggtcacttctgcatcatcactagctagttttctagtgttagagaggcttacaaatgtttgccattctcataagtgttttgaacttgatctttgtgacttgtgcttttttagcttctctcttgaatcagagtatcattgtcttcctccaaggagttagaatttcccagtttaaaacaaaaagggaaatgtcctaggttttctttgtgcttctcatttttcctttgttgattcaattcctgtgatttttgttctcttccctgaagtgctttacagtgcatggaatctccatcattgttattttaacgatagtaattcacagtcctcagaagcctatttttaaagcagaagcaaaaaagaaaaacaaaataacaaaaacaacccttcctcttttctctcatctcacctctctgtgttgattactaatcatcttagatattattgctagtggatgtatggtagatgggttgaagcttttctgataattattacacaatttaaaacaacatatatatttaaaataaatatatacagtaaatatattgagccatgttaacctgccaatgagatctgtgaaaaaataatggcctcatttttctctttttaatttcttttacccttttgtgaagcagctatacgtggcatacatgtatttaaagaaaaaaaaatagatgtagagtgttttttttacacttttaacttagcatgtggtgttgaagtattactgtagatcaagtttgtcttccgcactaagatgtgaggaaattgtgatttgttctctccaccacaaatgaattacacatttattatcttctatcattttgaaacactgcagtttaccatgggacactgtatatatttcttgccataatggtaaaggactgattgatatatttaagagttaataaatttgtgatttctgctgaaaaaaaaaaaaaaaaaa

SEQ ID NO: 41 - DNA, 3698 bp, Homo sapiens
ggtaaagtctcgcggtgctgccgggctcagccccgtctcctcctcttgctccctcggccgggcggcggtgactgtgcaccgacgtcggcgcgggctgcaccgccgcgtccgcccgcccgccagcatggccaccaccgccacctgcacccgtttcaccgacgactaccagctcttcgaggagcttggcaagggtgctttctctgtggtccgcaggtgtgtgaagaaaacctccacgcaggagtacgcagcaaaaatcatcaataccaagaagttgtctgcccgggatcaccagaaactagaacgtgaggctcggatatgtcgacttctgaaacatccaaacatcgtgcgcctccatgacagtatttctgaagaagggtttcactacctcgtgtttgaccttgttaccggcggggagctgtttgaagacattgtggccagagagtactacagtgaagcagatgccagccactgtatacatcagattctggagagtgttaaccacatccaccagcatgacatcgtccacagggacctgaagcctgagaacctgctgctggcgagtaaatgcaagggtgccgccgtcaagctggctgattttggcctagccatcgaagtacagggagagcagcaggcttggtttggttttgctggcaccccaggttacttgtcccctgaggtcttgaggaaagatccctatggaaaacctgtggatatctgggcctgcggggtcatcctgtatatcctcctggtgggctatcctcccttctgggatgaggatcagcacaagctgtatcagcagatcaaggctggagcctatgatttcccatcaccagaatgggacacggtaactcctgaagccaagaacttgatcaaccagatgctgaccataaacccagcaaagcgcatcacggctgaccaggctctcaagcacccgtgggtctgtcaacgatccacggtggcatccatgatgcatcgtcaggagactgtggagtgtttgcgcaagttcaatgcccggagaaaactgaagggtgccatcctcacgaccatgcttgtctccaggaacttctcagctgccaaaagcctattgaacaagaagtcggatggcggtgtcaagccacagagcaacaacaaaaacagtctcgtaagcccagcccaagagcccgcgcccttgcagacggccatggagccacaaaccactgtggtacacaacgctacagatgggatcaagggctccacagagagctgcaacaccaccacagaagatgaggacctcaaagtgcgaaaacaggagatcattaagattacagaacagctgattgaagccatcaacaatggggactttgaggcctacacgaagatttgtgatccaggcctcacttcctttgagcctgaggcccttggtaacctcgtggaggggatggatttccataagttttactttgagaatctcctgtccaagaacagcaagcctatccataccaccatcctaaacccacacgtccacgtgattggggaggacgcagcgtgcatcgcctacatccgcctcacccagtacatcgacgggcagggtcggcctcgcaccagccagtcagaagagacccgggtctggcaccgtcgggatggcaagtggctcaatgtccactatcactgctcaggggcccctgccgcaccgctgcagtgagctcagccacaggggctttaggagattccagccggaggtccaaccttcgcagccagtggctctggagggcctgagtgacagcggcagtcctgtttgtttgaggtttaaaacaattcaattacaaaagcggcagcagccaatgcacgcccctgcatgcagccctcccgcccgcccttcgtgtctgtctctgctgtaccgaggtgttttttacatttaagaaaaaaaaaaaagaaaaaaagattgtttaaaaaaaaaaggaatccataccatgatgcgttttaaaaccaccgacagcccttgggttggcaagaaggcaggagtatgtatgaggtccatcctggcatgagcagtggctcacccaccggccttgaagaggtgagcttggcctctctggtccccatggacttagggggaccaggcaagaactctgacagagctttgggggccgtgatgtgattgcagctcctgaggtggcctgcttaccccaggtctaggaatgaacttctttggaacttgcataggcgcctagaatggggctgatgagaacatcgtgaccatcagacctacttgggagagaacgcagagctcccagcctgctgtggaggcagctgagaagtggtggcctcaggactgagagcccggacgttgctgtactgtcttgtttagtgtagaagggaagagaattggtgctgcagaagtgtacccgccatgaagccgatgagaaacctcgtgttagtctgacatgcactcactcatccatttctataggatgcacaatgcatgtgggccctaatattgaggccttatccctgcagctaggagggggaggggttgttgctgctttgcttcgtgttttcttctaacctggcaaggagagagccaggccctggtcagggctcccgtgccgcctttggcggttctgtttctgtgctgatctggaccatctttgtcttgccttttcacggtagtggtccccatgctgaccctcatctgggcctgggccctctgccaagtgcccctgtgggatgggaggagtgaggcagtgggagaagaggtggtggtcgtttctatgcattcaggctgcctttggggctgcctcccttcttattcttccttgctgcacgtccatctcttttcctgtctttgagattgacctgactgctctggcaagaagaagaggtgtccttacagaggcctctttactgaccaactgaagtatagacttactgctggacaatctgcatgggcatcacccctccccgcatgtaacccaaaagaggtgtccagagccaaggcttctaccttcattgtccctctctgtgctcaaggagttccattccaggaggaagagatctataccctaagcagatagcaaagaagataatggaggagcaattggtcatggccttggtttccctcaaaacaacgctgcagatttatctgcacaaacatctccacttttgggggaaaggtgggtagattccagttccctggactaccttcaggaggcacgagagctgggagaagaggcaaagctacaggtttacttgggagccagctgagaagagagcagactcacaggtgctggtgcttggatttagccaggctcctccgagcacctcatgcatgtcccagcccctgggccctagccctttcctgccctgcagtctgcagtgccagcacgcaaatcccttcaccacagggtttcgttttgctggcttgaagacaaatggtcttagaattcattgagacccatagcttcatatggctgctccagccccacttcttagcattcttactcctcttctggggctaatgtcagcatctatagacaatagactattaaaaaatcaccttttaaacaagaaacggaaggcatttgatgcagaatttttgcatgacaacatagaaataatttaaaaatagtgtttgttctgaatgttggtagacccttcatagctttgttacaatgaaaccttgaactgaaaatatttaataaaataacctttaaacagtc

SEQ ID NO: 42 - DNA, 1584 bp, Homo sapiens
ggccctggggcgggggcgggtcctggggactggggcgggcggccgaggcccggaagcggactgaggcggcctggagtcttagttggctactcgccatggacgaagcggatcggcggctcctgcggcggtgccggctgcggctggtggaagagctgcaggtggaccagctctgggacgccctgctgagccgcgagctgttcaggccccatatgatcgaggacatccagcgggcaggctctggatctcggcgggatcaggccaggcagctgatcatagatctggagactcgagggagtcaggctcttcctttgttcatctcctgcttagaggacacaggccaggacatgctggcttcgtttctgcgaactaacaggcaagcagcaaagttgtcgaagccaaccctagaaaaccttaccccagtggtgctcagaccagagattcgcaaaccagaggttctcagaccggaaacacccagaccagtggacattggttctggaggatttggtgatgtcgagcagaaagaccatgggtttgaggtggcctccacttcccctgaagacgagtcccctggcagtaaccccgagccagatgccaccccgttccaggaaggtttgaggaccttcgaccagctggacgccatatctagtttgcccacacccagtgacatctttgtgtcctactctactttcccaggttttgtttcctggagggaccccaagagtggctcctggtacgttgagaccctggacgacatctttgagcagtgggctcactctgaagacctgcagtccctcctgcttagggtcgctaatgctgtttcggtgaaagggatttataaacagatgcctggttgctttaatttcctccggaaaaaacttttctttaaaacatcataaggccagggcccctcaccctgccttatcttgcaccccaaagctttcctgccccaggcctgaaagaggctgaggcctggactttcctgcaactcaaggactttgcagccggcacagggtctgctctttctctgccagtgacagacaggctcttagcagcttccagattgacgacaagtgctgaacagtggaggaagagggacagatgaatgccgtggattgcacgtggcctcttgagcagtggctggtccagggctagtgacttgtgtcccatgatccctgtgttgtctctagagcagggattaacctctgcactactgacatgtggggccaggtcaccctttgctgtgaggctgtcctgtacattgtgggatgttcagcactgtcccttgcctcaatgccagtaacgcgtcttcctgagtggtgccaaacaaaaaggttctcaggtgttgccaaatatgtcctggggtataaaactttcctcgcctgacaaccactggtctgtagggatttttggctacacacaaaccagtatcgctcatagatcagcaaaccggggcctactagagtctgaacagctgtaatctatgaattctaagtgaaattttaaaaattgttaatttttcctatattgcattaattttaaaaaaaaaaaaaaaaaaaaaaaaaaaaaaaaaaaaaaaaaaaaaaa

SEQ ID NO: 43 - DNA, 2704 bp, Homo sapiens
gggagaaacgttctcactcgctctctgctcgctgcgggcgctccccgccctctgctgccagaaccttggggatgtgcctagacccggcgcagcacacgtccgggccaaccgcgagcagaacaaacctttggcgggcggccaggaggctccctcccagccaccgcccccctccagcgcctttttttccccccatacaatacaagatcttccttcctcagttcccttaaagcacagcccagggaaacctcctcacagttttcatccagccacgggccagcatgtctgggggcaaatacgtagactcggagggacatctctacaccgttcccatccgggaacagggcaacatctacaagcccaacaacaaggccatggcagacgagctgagcgagaagcaagtgtacgacgcgcacaccaaggagatcgacctggtcaaccgcgaccctaaacacctcaacgatgacgtggtcaagattgactttgaagatgtgattgcagaaccagaagggacacacagttttgacggcatttggaaggccagcttcaccaccttcactgtgacgaaatactggttttaccgcttgctgtctgccctctttggcatcccgatggcactcatctggggcatttacttcgccattctctctttcctgcacatctgggcagttgtaccatgcattaagagcttcctgattgagattcagtgcatcagccgtgtctattccatctacgtccacaccgtctgtgacccactctttgaagctgttgggaaaatattcagcaatgtccgcatcaacttgcagaaagaaatataaatgacatttcaaggatagaagtatacctgattttttttccttttaattttcctggtgccaatttcaagttccaagttgctaatacagcaacaatttatgaattgaattatcttggttgaaaataaaaagatcactttctcagttttcataagtattatgtctcttctgagctatttcatctatttttggcagtctgaatttttaaaacccatttaaatttttttccttacctttttatttgcatgtggatcaaccatcgctttattggctgagatatgaacatattgttgaaaggtaatttgagagaaatatgaagaactgaggaggaaaaaaaaaaaaaagaaaagaaccaacaacctcaactgcctactccaaaatgttggtcattttatgttaagggaagaattccagggtatggccatggagtgtacaagtatgtgggcagattttcagcaaactcttttcccactgtttaaggagttagtggattactgccattcacttcataatccagtaggatccagtgatccttacaagttagaaaacataatcttctgccttctcatgatccaactaatgccttactcttcttgaaattttaacctatgatattttctgtgcctgaatatttgttatgtagataacaagacctcagtgccttcctgtttttcacattttccttttcaaatagggtctaactcagcaactcgctttaggtcagcagcctccctgaagaccaaaattagaatatccatgacctagttttccatgcgtgtttctgactctgagctacagagtctggtgaagctcacttctgggcttcatctggcaacatctttatccgtagtgggtatggttgacactagcccaatgaaatgaattaaagtggaccaatagggctgagctctctgtgggctggcagtcctggaagccagctttccctgcctctcatcaactgaatgaggtcagcatgtctattcagcttcgtttattttcaagaataatcacgctttcctgaatccaaactaatccatcaccggggtggtttagtggctcaacattgtgttcccatttcagctgatcagtgggcctccaaggaggggctgtaaaatggaggccattgtgtgagcctatcagagttgctgcaaacctgacccctgctcagtaaagcacttgcaaccgtctgttatgctgtgacacatggcccctccccctgccaggagctttggacctaatccaagcatccctttgcccagaaagaagatgggggaggaggcagtaataaaaagattgaagtattttgctggaataagttcaaattcttctgaactcaaactgaggaatttcacctgtaaacctgagtcgtacagaaagctgcctggtatatccaaaagctttttattcctcctgctcatattgtgattctgcctttggggacttttcttaaaccttcagttatgatttttttttcatacacttattggaactctgcttgatttttgcctcttccagtcttcctgacactttaattaccaacctgttacctactttgactttttgcatttaaaacagacactggcatggatatagttttacttttaaactgtgtacataactgaaaatgtgctatactgcatactttttaaatgtaaagatatttttatctttatatgaagaaaatcacttaggaaatggctttgtgattcaatctgtaaactgtgtattccaagacatgtctgttctacatagatgcttagtccctcatgcaaatcaattactggtccaaaagattgctgaaattttatatgcttactgatatattttacaattttttatcatgcatgtcctgtaaaggttacaagcctgcacaataaaaatgtttaacggtt

SEQ ID NO: 44 - DNA, 1287 bp, Homo sapiens
aggcggcaggaggcgggtgggtcaaggtaactctgggctacagagtccttgctgggggttcggggagcgcttggaccccggcttctgggacgcgtcagaatattatccagcaatgcaaatgaacaaactataactacacacagctgcatggataaatgtcagaaacatgacgttgagtgtgagaagccagatgcaaacgaggactcactgtgcaattctgtgcatgtacagtggccaggagaagggagcactggctttgctttcatcaggccaaagatgcctttctttgggaatacgttcagtccgaagaagacacctcctcggaagtcggcatctctctccaacctgcattctttggatcgatcaacccgggaggtggagctgggcttggaatacggatccccgactatgaacctggcagggcaaagcctgaagtttgaaaatggccagtggatagcagagacaggggttagtggcggtgtggaccggagggaggttcagcgccttcgcaggcggaaccagcagttggaggaagagaacaatctcttgcggctgaaagtggacatcttattagacatgctttcagagtccactgctgaatcccacttaatggagaaggaactggatgaactgaggatcagccggaagagaaaatgaagaccccagagacatttattggggagtaggatgtggctgagtgctttttttttggccagactagcggattcagtcctggaagagagtatcatataatgagacccacaggcactggcacccttgggttggcaatagaaggtgacatggaatggagaaaaccaagattccagatggggatagtaactagaaggtgcttcagatgcactgcctgcgggtgccagtctgaaaaccagaccgcacagaggcctggggctgctgatgagctttttggtgctctccacacacaagctcgcaaacacacatgtcccagaatagctctgttgggttgtgttgggagaagcggctggagttcattctctcacccccttatgttggtgtttggcgtgtgacagcagttctacagagctctgtgttggggtcatggatgagcggctctcttggctcttaaaggcaggcctctctcttcttgcctttaaagaatcctccttcctcacacctggcctcctctggcttcagcttctcagcagcaagcaccagccttccacaacaacactatatttttatgctactttcctgtttgcactactacttttttattaaacgatgttaaataaaaaaaaaaaaaaaaaa

SEQ ID NO: 45 - DNA, 4304 bp, Homo sapiens
cacacggactacaggggagttttgttgaagttgcaaagtcctggagcctccagagggctgtcggcgcagtagcagcgagcagcagagtccgcacgctccggcgaggggcagaagagcgcgagggagcgcggggcagcagaagcgagagccgagcgcggacccagccaggacccacagccctccccagctgcccaggaagagccccagccatggaacaccagctcctgtgctgcgaagtggaaaccatccgccgcgcgtaccccgatgccaacctcctcaacgaccgggtgctgcgggccatgctgaaggcggaggagacctgcgcgccctcggtgtcctacttcaaatgtgtgcagaaggaggtcctgccgtccatgcggaagatcgtcgccacctggatgctggaggtctgcgaggaacagaagtgcgaggaggaggtcttcccgctggccatgaactacctggaccgcttcctgtcgctggagcccgtgaaaaagagccgcctgcagctgctgggggccacttgcatgttcgtggcctctaagatgaaggagaccatccccctgacggccgagaagctgtgcatctacaccgacaactccatccggcccgaggagctgctgcaaatggagctgctcctggtgaacaagctcaagtggaacctggccgcaatgaccccgcacgatttcattgaacacttcctctccaaaatgccagaggcggaggagaacaaacagatcatccgcaaacacgcgcagaccttcgttgccctctgtgccacagatgtgaagttcatttccaatccgccctccatggtggcagcggggagcgtggtggccgcagtgcaaggcctgaacctgaggagccccaacaacttcctgtcctactaccgcctcacacgcttcctctccagagtgatcaagtgtgacccggactgcctccgggcctgccaggagcagatcgaagccctgctggagtcaagcctgcgccaggcccagcagaacatggaccccaaggccgccgaggaggaggaagaggaggaggaggaggtggacctggcttgcacacccaccgacgtgcgggacgtggacatctgagggcgccaggcaggcgggcgccaccgccacccgcagcgagggcggagccggccccaggtgctcccctgacagtccctcctctccggagcattttgataccagaagggaaagcttcattctccttgttgttggttgttttttcctttgctctttcccccttccatctctgacttaagcaaaagaaaaagattacccaaaaactgtctttaaaagagagagagagaaaaaaaaaatagtatttgcataaccctgagcggtgggggaggagggttgtgctacagatgatagaggattttataccccaataatcaactcgtttttatattaatgtacttgtttctctgttgtaagaataggcattaacacaaaggaggcgtctcgggagaggattaggttccatcctttacgtgtttaaaaaaaagcataaaaacattttaaaaacatagaaaaattcagcaaaccatttttaaagtagaagagggttttaggtagaaaaacatattcttgtgcttttcctgataaagcacagctgtagtggggttctaggcatctctgtactttgcttgctcatatgcatgtagtcactttataagtcattgtatgttattatattccgtaggtagatgtgtaacctcttcaccttattcatggctgaagtcacctcttggttacagtagcgtagcgtgcccgtgtgcatgtcctttgcgcctgtgaccaccaccccaacaaaccatccagtgacaaaccatccagtggaggtttgtcgggcaccagccagcgtagcagggtcgggaaaggccacctgtcccactcctacgatacgctactataaagagaagacgaaatagtgacataatatattctatttttatactcttcctatttttgtagtgacctgtttatgagatgctggttttctacccaacggccctgcagccagctcacgtccaggttcaacccacagctacttggtttgtgttcttcttcatattctaaaaccattccatttccaagcactttcagtccaataggtgtaggaaatagcgctgtttttgttgtgtgtgcagggagggcagttttctaatggaatggtttgggaatatccatgtacttgtttgcaagcaggactttgaggcaagtgtgggccactgtggtggcagtggaggtggggtgtttgggaggctgcgtgccagtcaagaagaaaaaggtttgcattctcacattgccaggatgataagttcctttccttttctttaaagaagttgaagtttaggaatcctttggtgccaactggtgtttgaaagtagggacctcagaggtttacctagagaacaggtggtttttaagggttatcttagatgtttcacaccggaaggtttttaaacactaaaatatataatttatagttaaggctaaaaagtatatttattgcagaggatgttcataaggccagtatgatttataaatgcaatctccccttgatttaaacacacagatacacacacacacacacacacacacaaaccttctgcctttgatgttacagatttaatacagtttatttttaaagatagatccttttataggtgagaaaaaaacaatctggaagaaaaaaaccacacaaagacattgattcagcctgtttggcgtttcccagagtcatctgattggacaggcatgggtgcaaggaaaattagggtactcaacctaagttcggttccgatgaattcttatcccctgccccttcctttaaaaaacttagtgacaaaatagacaatttgcacatcttggctatgtaattcttgtaatttttatttaggaagtgttgaagggaggtggcaagagtgtggaggctgacgtgtgagggaggacaggcgggaggaggtgtgaggaggaggctcccgaggggaaggggcggtgcccacaccggggacaggccgcagctccattttcttattgcgctgctaccgttgacttccaggcacggtttggaaatattcacatcgcttctgtgtatctctttcacattgtttgctgctattggaggatcagttttttgttttacaatgtcatatactgccatgtactagttttagttttctcttagaacattgtattacagatgccttttttgtagttttttttttttttatgtgatcaattttgacttaatgtgattactgctctattccaaaaaggttgctgtttcacaatacctcatgcttcacttagccatggtggacccagcgggcaggttctgcctgctttggcgggcagacacgcgggcgcgatcccacacaggctggcgggggccggccccgaggccgcgtgcgtgagaaccgcgccggtgtccccagagaccaggctgtgtccctcttctcttccctgcgcctgtgatgctgggcacttcatctgatcgggggcgtagcatcatagtagtttttacagctgtgttattctttgcgtgtagctatggaagttgcataattattattattattattataacaagtgtgtcttacgtgccaccacggcgttgtacctgtaggactctcattcgggatgattggaatagcttctggaatttgttcaagttttgggtatgtttaatctgttatgtactagtgttctgtttgttattgttttgttaattacaccataatgctaatttaaagagactccaaatctcaatgaagccagctcacagtgctgtgtgccccggtcacctagcaagctgccgaaccaaaagaatttgcaccccgctgcgggcccacgtggttggggccctgccctggcagggtcatcctgtgctcggaggccatctcgggcacaggcccaccccgccccacccctccagaacacggctcacgcttacctcaaccatcctggctgcggcgtctgtctgaaccacgcgggggccttgagggacgctttgtctgtcgtgatggggcaagggcacaagtcctggatgttgtgtgtatcgagaggccaaaggctggtggcaagtgcacggggcacagcggagtctgtcctgtgacgcgcaagtctgagggtctgggcggcgggcggctgggtctgtgcatttctggttgcaccgcggcgcttcccagcaccaacatgtaaccggcatgtttccagcagaagacaaaaagacaaacatgaaagtctagaaataaaactggtaaaaccccaaaaaaaaaaaaaaaa

SEQ ID NO: 46 - DNA, 6480 bp, Homo sapiens
agagcgagcaggggagagcgagaccagttttaaggggaggaccggtgcgagtgaggcagccccgaggctctgctcgcccaccacccaatcctcgcctcccttctgctccaccttctctctctgccctcacctctcccccgaaaaccccctatttagccaaaggaaggaggtcaggggaacgctctcccctccccttccaaaaaacaaaaacagaaaaacccttttccaggccggggaaagcaggagggagaggggccgccgggctggccatggagctgctgtgccacgaggtggacccggtccgcagggccgtgcgggaccgcaacctgctccgagacgaccgcgtcctgcagaacctgctcaccatcgaggagcgctaccttccgcagtgctcctacttcaagtgcgtgcagaaggacatccaaccctacatgcgcagaatggtggccacctggatgctggaggtctgtgaggaacagaagtgcgaagaagaggtcttccctctggccatgaattacctggaccgtttcttggctggggtcccgactccgaagtcccatctgcaactcctgggtgctgtctgcatgttcctggcctccaaactcaaagagaccagcccgctgaccgcggagaagctgtgcatttacaccgacaactccatcaagcctcaggagctgctggagtgggaactggtggtgctggggaagttgaagtggaacctggcagctgtcactcctcatgacttcattgagcacatcttgcgcaagctgccccagcagcgggagaagctgtctctgatccgcaagcatgctcagaccttcattgctctgtgtgccaccgactttaagtttgccatgtacccaccgtcgatgatcgcaactggaagtgtgggagcagccatctgtgggctccagcaggatgaggaagtgagctcgctcacttgtgatgccctgactgagctgctggctaagatcaccaacacagacgtggattgtctcaaagcttgccaggagcagattgaggcggtgctcctcaatagcctgcagcagtaccgtcaggaccaacgtgacggatccaagtcggaggatgaactggaccaagccagcacccctacagacgtgcgggatatcgacctgtgaggatgccagttgggccgaaagagagagacgcgtccataatctggtctcttcttctttctggttgtttttgttctttgtgttttagggtgaaacttaaaaaaaaaattctgcccccacctagatcatatttaaagatcttttagaagtgagagaaaaaggtcctacgaaaacggaataataaaaagcatttggtgcctatttgaagtacagcataagggaatcccttgtatatgcgaacagttattgtttgattatgtaaaagtaatagtaaaatgcttacaggaaaacctgcagagtagttagagaatatgtatgcctgcaatatgggaacaaattagaggagacttttttttttcatgttatgagctagcacatacacccccttgtagtataatttcaaggaactgtgtacgccatttatggcatgattagattgcaaagcaatgaactcaagaaggaattgaaataaggagggacatgatggggaaggagtacaaaacaatctctcaacatgattgaaccatttgggatggagaagcacctttgctctcagccacctgttactaagtcaggagtgtagttggatctctacattaatgtcctcttgctgtctacagtagctgctacctaaaaaaagatgttttattttgccagttggacacaggtgattggctcctgggtttcatgttctgtgacatcctgcttcttcttccaaatgcagttcattgcagacaccaccatattgctatctaatggggaaatgtagctatgggccataaccaaaactcacatgaaacggaggcagatggagaccaagggtgggatccagaatggagtcttttctgttattgtatttaaaagggtaatgtggccttggcatttcttcttagaaaaaaactaatttttggtgctgattggcatgtctggttcacagtttagcattgttataaaccattccattcgaaaagcactttgaaaaattgttcccgagcgatagatgggatggtttatgcaagtcatgctgaatactcctcccctcttctcttttgccccctcccttcctgcccccagtctgggttactcttcgcttctggtatctggcgttctttggtacacagttctggtgttcctaccaggactcaagagacaccccttcctgctgacattcccatcacaacattcctcagacaagcctgtaaactaaaatctgttaccattctgatggcacagaaggatcttaattcccatctctatacttctcctttggacatggaaagaaaagttattgctggtgcaaagatagatggctgaacatcagggtgtggcattttgttcccttttccgttttttttttttttattgttgttgttaattttattgcaaagttgtattcagcgtacttgaatttttcttcctctccacttcttagaggcattcagttagcaaagaggttggagcaacaacttttttttttttttttgcacaattgtaattgacaggtaatgaagctatttgttaaaatatttgcctttttaagtaaaaaagaaaaatcagaacagggctatttgaagaattattttatacacagattctgccttgtttcatagtatgagggttgaagacggaaaacaatctaagggtctctcatttttttaattttgttttgttcagtttggtttttttttttttttgcgctgctaagaagctaaagtcatccatccttattcacgttgacagtacctagctgtaatgtttcacagagtgtgctgctattttataaacatttttataatatattattttactgcttaaattccaagtcctgaagtagatggttgagatatgagttcttcgtactggaaaagcccttccgtagtttgttttcttctggtagcatattcatggttgtttttttttttcttttttggttttttggttttttttttttcctctgatcacattcttcaaagacggagtattctttacctcaggtttactggacaaaatcaataactacaaaaggcaatgattcacgcttttgttttcataatacctcacaaccgtacagtttctgcttgggagcccattcgcatgaggaatacagaagcagtgtgagcagggctgactccctctcaggtggaaggcagggcggtctcactcccagggacctttttggtcatggaggccatcgggctcccagttagaccctggtatcctcatcatgatggaaaaaatacattgaaccaagggatcctccctccccttcaaggcagacgttcagtacaaacatttatgcggtaggctcagatgtcgtaatttgcacttaggtaccaggtgtcaggaaacagactaaaaagaattccaccaggctgtttggagatcctcatcttggagctttttcaaaagcggggcttcatctgcaaagggccctttcatcttgaagtttttcccctccgtctttcccctcccctggcatggacaccttgtgtttaggatcatctctgcaggtttcctaggtctgaatctgcgagtagatgaacctgcagcaagcagcgtttatggtgcttccttctccctcctctgtctcaaactgcgcaggcaagcactatgcaagcccaggccctctgctgagcggtactaaacggtcgggttttcaatcacactgaattggcaggataagaaaaataggtcagataagtatgggatgatagttgaagggaggtgaagaggctgcttctctacagaggtgaaattccagatgagtcagtctcttgggaagtgtgtttagaagggttcaggactttgtgagttagcatgaccctaaaattctaggggatttctggtgggacaatgggtggtgaattttgaagttttggagagggaagtggagcagccagcaagtaagctagccagagttttctcaagagccagctttgctcagcacactctcctgggccccaaggagtcccacggaatggggaaagtgggaaccctggagttcttgggaatcttggagcctaaagagaaaccgaggtgcaaattcatttcatggtgactgacccttgagcttaaacagaagcagcaaatgaaagaaccggacaaataaggaagggcacaagcctacccgactctatttacagtctgtaactttccactcttcctgtagtcccgaggcccctgggtccttctagcttttctctttcccatccttggggccttgtgtgatgatgggtgtggggctgccgatgggaaagtcgggggttgttaggcttttctgcctgctcctgcttaaacacaagaaggaatcctggattttgccctctccttagctcttagtctctttggtaggagttttgttccagaggagctctcccccttggatttgaacttgctctttttgttgttgttgttctttctcttctttttcttacctcccactaaaggggttccaaattatcctggtctttttctaccttgttgtgtttctatctcgtctttacttccatctgtttgtttttttctccatcagtgggggccgagttgttcccccagcctgccaaattttgatccttcccctcttttggccaaatcctagggggaagaaatcctagtatgccaaaaatatatgctaagcataattaaactccatgcgggtccataacagccaagaagcctgcaggagaaagccaagggcagttccctccgcagaacaccccatgcgtgctgagaggcgagctccttgaagaaggggctgttcttccaggaggccttattttgaactgcctcaggaccccactggagagcacagcatgccttactactgggtcatccttggtctatgtgctctgtactggaggctctgttctgcctcttatcagccaggtcaggggcacacatggcttaagtgacaaagccagaggagaagacaaccctgacagcatcacgctgcatcccattgctagcaggattggcaactcttcagacggagctgcgcttccctgcagtctagcacctctagggcctctccagactgtgccctgggagctctgggactgaaaggttaagaacataaggcaggatcagatgactctctccaagagggcaggggaattttctctccatgggccacaggggacagggctgggagaagaaatagacttgcaccttatgtcatgtaaataattgattttctagttcaagaagataatattggtagtgtgggaattggaggtaggaaggggaggaagtctgagtaagccagttggcttctaagccaaaaggattcctctttgtttatctctgagacagtccaaccttgagaatagctttaaaagggaaattaatgctgagatgataaagtccccttaagccaacaaaccctctgtagctatagaatgagtgcaggtttctattggtgtggactcagagcaatttacaagagctgttcatgcagccatccatttgtgcaaaatagggtaagaagattcaagaggatatttattacttcctcataccacatggcttttgatgattctggattctaaacaacccagaatggtcatttcaggcacaacgatactacattcgtgtgtgtctgcttttaaacttggctgggctatcagaccctattctcggctcaggttttgagaagccatcagcaaatgtgtacgtgcatgctgtagctgcagcctgcatcccttcgcctgcagcctactttggggaaataaagtgccttactgactgtagccattacagtatccaatgtcttttgacaggtgcctgtccttgaaaaacaaagtttctatttttatttttaattggtttagttcttaactgctggccaactcttacatccccagcaaatcatcgggccattggattttttccattatgttcatcacccttatatcatgtacctcagatctctctctctctcctctctctcagttatatagtttcttgtcttggactttttttttcttttctttttctttttttttttgctttaaaacaagtgtgatgccatatcaagtccatgttattctctcacagtgtactctataagaggtgtgggtgtctgtttggtcaggatgttagaaagtgctgataagtagcatgatcagtgtatgcgaaaaggtttttaggaagtatggcaaaaatgttgtattggctatgatggtgacatgatatagtcagctgccttttaagaggtcttatctgttcagtgttaagtgatttaaaaaaataataacctgttttctgactagtttaaagatggatttgaaaatggttttgaatgcaattaggttatgctatttggacaataaactcaccttgacct

SEQ ID NO: 47 - DNA, 2095 bp, Homo sapiens
gcgcctgtcagggaagcggcgcgcgcgcgcgggcggcgggcgggctggggatccgccgcgcagtgccagcgccagcgccagacccgcgccccgcgctctccggcccgtcgcctgccttgggactcgcgagcccgcactcccgccctgcctgttcgctgcccgagtatggagctgctgtgttgcgaaggcacccggcacgcgccccgggccgggccggacccgcggctgctgggggaccagcgtgtcctgcagagcctgctccgcctggaggagcgctacgtaccccgcgcctcctacttccagtgcgtgcagcgggagatcaagccgcacatgcggaagatgctggcttactggatgctggaggtatgtgaggagcagcgctgtgaggaggaagtcttccccctggccatgaactacctggatcgctacctgtcttgcgtccccacccgaaaggcgcagttgcagctcctgggtgcggtctgcatgctgctggcctccaagctgcgcgagaccacgcccctgaccatcgaaaaactgtgcatctacaccgaccacgctgtctctccccgccagttgcgggactgggaggtgctggtcctagggaagctcaagtgggacctggctgctgtgattgcacatgatttcctggccttcattctgcaccggctctctctgccccgtgaccgacaggccttggtcaaaaagcatgcccagacctttttggccctctgtgctacagattatacctttgccatgtacccgccatccatgatcgccacgggcagcattggggctgcagtgcaaggcctgggtgcctgctccatgtccggggatgagctcacagagctgctggcagggatcactggcactgaagtggactgcctgcgggcctgtcaggagcagatcgaagctgcactcagggagagcctcagggaagcctctcagaccagctccagcccagcgcccaaagccccccggggctccagcagccaagggcccagccagaccagcactcctacagatgtcacagccatacacctgtagccctggagaggccctctggagtggccactaagcagaggaggggccgctgccacccacctccctgcctccaggaaccacaccacatctaagcctgaaggggcgtctgttcccccttcacaaagcccaagggatctggtcctacccatccccgcagtgtgcactaaggggcccggccagccatgtctgcatttcggtggctagtcaagctcctcctccctgcatctgaccagcagcgcctttcccaactctagctgggggtgggccaggctgatgggacagaattggatacatacaccagcattccttttgaacgcccccccccacccctgggggctctcatgttttcaactgccaaaatgctctagtgccttctaaaggtgttgtcccttctagggttattgcatttggattggggtccctctaaaatttaatgcatgatagacacatatgagggggaatagtctagatggctcctctcagtactttggaggcccctatgtagtccgtgctgacagctgctcctagagggaggggcctaggcctcagccagagaagctataaattcctctttgctttgctttctgctcagcttctcctgtgtgattgacagctttgctgctgaaggctcattttaatttattaattgctttgagcacaactttaagaggacataatgggggcctggccatcccacaagtggtggtaaccctggtggttgctgttttcctcccttctgctactggcaaaaggatctttgtggccaaggagctgctatagcctggggtggggtcatgccctcctctcccattgtccctctgccccatcctccagcagggaaaatgcagcagggatgccctggaggtggctgagcccctgtctagagagggaggcaagccctgttgacacaggtctttcctaaggctgcaaggtttaggctggtggcccaggaccatcatcctactgtaataaagatgattgtgaaataaaactggctttggcttcttggaaaaaaaaaaaaaaaaaaaaaaaaaaaaaaaaaaaaaaaaaaaaa

SEQ ID NO: 48 - DNA, 5619 bp, Homo sapiens
gagaagaaagccagtgcgtctctgggcgcaggggccagtggggctcggaggcacaggcaccccgcgacactccaggttccccgacccacgtccctggcagccccgattatttacagcctcagcagagcacggggcgggggcagaggggcccgcccgggagggctgctacttcttaaaacctctgcgggctgcttagtcacagccccccttgcttgggtgtgtccttcgctcgctccctccctccgtcttaggtcactgttttcaacctcgaataaaaactgcagccaacttccgaggcagcctcattgcccagcggaccccagcctctgccaggttcggtccgccatcctcgtcccgtcctccgccggcccctgccccgcgcccagggatcctccagctcctttcgcccgcgccctccgttcgctccggacaccatggacaagttttggtggcacgcagcctggggactctgcctcgtgccgctgagcctggcgcagatcgatttgaatataacctgccgctttgcaggtgtattccacgtggagaaaaatggtcgctacagcatctctcggacggaggccgctgacctctgcaaggctttcaatagcaccttgcccacaatggcccagatggagaaagctctgagcatcggatttgagacctgcaggtatgggttcatagaagggcacgtggtgattccccggatccaccccaactccatctgtgcagcaaacaacacaggggtgtacatcctcacatccaacacctcccagtatgacacatattgcttcaatgcttcagctccacctgaagaagattgtacatcagtcacagacctgcccaatgcctttgatggaccaattaccataactattgttaaccgtgatggcacccgctatgtccagaaaggagaatacagaacgaatcctgaagacatctaccccagcaaccctactgatgatgacgtgagcagcggctcctccagtgaaaggagcagcacttcaggaggttacatcttttacaccttttctactgtacaccccatcccagacgaagacagtccctggatcaccgacagcacagacagaatccctgctaccagtacgtcttcaaataccatctcagcaggctgggagccaaatgaagaaaatgaagatgaaagagacagacacctcagtttttctggatcaggcattgatgatgatgaagattttatctccagcaccatttcaaccacaccacgggcttttgaccacacaaaacagaaccaggactggacccagtggaacccaagccattcaaatccggaagtgctacttcagacaaccacaaggatgactgatgtagacagaaatggcaccactgcttatgaaggaaactggaacccagaagcacaccctcccctcattcaccatgagcatcatgaggaagaagagaccccacattctacaagcacaatccaggcaactcctagtagtacaacggaagaaacagctacccagaaggaacagtggtttggcaacagatggcatgagggatatcgccaaacacccaaagaagactcccattcgacaacagggacagctgcagcctcagctcataccagccatccaatgcaaggaaggacaacaccaagcccagaggacagttcctggactgatttcttcaacccaatctcacaccccatgggacgaggtcatcaagcaggaagaaggatggatatggactccagtcatagtataacgcttcagcctactgcaaatccaaacacaggtttggtggaagatttggacaggacaggacctctttcaatgacaacgcagcagagtaattctcagagcttctctacatcacatgaaggcttggaagaagataaagaccatccaacaacttctactctgacatcaagcaataggaatgatgtcacaggtggaagaagagacccaaatcattctgaaggctcaactactttactggaaggttatacctctcattacccacacacgaaggaaagcaggaccttcatcccagtgacctcagctaagactgggtcctttggagttactgcagttactgttggagattccaactctaatgtcaatcgttccttatcaggagaccaagacacattccaccccagtggggggtcccataccactcatggatctgaatcagatggacactcacatgggagtcaagaaggtggagcaaacacaacctctggtcctataaggacaccccaaattccagaatggctgatcatcttggcatccctcttggccttggctttgattcttgcagtttgcattgcagtcaacagtcgaagaaggtgtgggcagaagaaaaagctagtgatcaacagtggcaatggagctgtggaggacagaaagccaagtggactcaacggagaggccagcaagtctcaggaaatggtgcatttggtgaacaaggagtcgtcagaaactccagaccagtttatgacagctgatgagacaaggaacctgcagaatgtggacatgaagattggggtgtaacacctacaccattatcttggaaagaaacaaccgttggaaacataaccattacagggagctgggacacttaacagatgcaatgtgctactgattgtttcattgcgaatcttttttagcataaaattttctactctttttgttttttgtgttttgttctttaaagtcaggtccaatttgtaaaaacagcattgctttctgaaattagggcccaattaataatcagcaagaatttgatcgttccagttcccacttggaggcctttcatccctcgggtgtgctatggatggcttctaacaaaaactacacatatgtattcctgatcgccaacctttcccccaccagctaaggacatttcccagggttaatagggcctggtccctgggaggaaatttgaatgggtccattttgcccttccatagcctaatccctgggcattgctttccactgaggttgggggttggggtgtactagttacacatcttcaacagaccccctctagaaatttttcagatgcttctgggagacacccaaagggtgaagctatttatctgtagtaaactatttatctgtgtttttgaaatattaaaccctggatcagtcctttgatcagtataattttttaaagttactttgtcagaggcacaaaagggtttaaactgattcataataaatatctgtacttcttcgatcttcaccttttgtgctgtgattcttcagtttctaaaccagcactgtctgggtccctacaatgtatcaggaagagctgagaatggtaaggagactcttctaagtcttcatctcagagaccctgagttcccactcagacccactcagccaaatctcatggaagaccaaggagggcagcactgtttttgttttttgttttttgttttttttttttgacactgtccaaaggttttccatcctgtcctggaatcagagttggaagctgaggagcttcagcctcttttatggtttaatggccacctgttctctcctgtgaaaggctttgcaaagtcacattaagtttgcatgacctgttatccctggggccctatttcatagaggctggccctattagtgatttccaaaaacaatatggaagtgccttttgatgtcttacaataagagaagaagccaatggaaatgaaagagattggcaaaggggaaggatgatgccatgtagatcctgtttgacatttttatggctgtatttgtaaacttaaacacaccagtgtctgttcttgatgcagttgctatttaggatgagttaagtgcctggggagtccctcaaaaggttaaagggattcccatcattggaatcttatcaccagataggcaagtttatgaccaaacaagagagtactggctttatcctctaacctcatattttctcccacttggcaagtcctttgtggcatttattcatcagtcagggtgtccgattggtcctagaacttccaaaggctgcttgtcatagaagccattgcatctataaagcaacggctcctgttaaatggtatctcctttctgaggctcctactaaaagtcatttgttacctaaacttatgtgcttaacaggcaatgcttctcagaccacaaagcagaaagaagaagaaaagctcctgactaaatcagggctgggcttagacagagttgatctgtagaatatctttaaaggagagatgtcaactttctgcactattcccagcctctgctcctccctgtctaccctctcccctccctctctccctccacttcaccccacaatcttgaaaaacttcctttctcttctgtgaacatcattggccagatccattttcagtggtctggatttctttttattttcttttcaacttgaaagaaactggacattaggccactatgtgttgttactgccactagtgttcaagtgcctcttgttttcccagagatttcctgggtctgccagaggcccagacaggctcactcaagctctttaactgaaaagcaacaagccactccaggacaaggttcaaaatggttacaacagcctctacctgtcgccccagggagaaaggggtagtgatacaagtctcatagccagagatggttttccactccttctagatattcccaaaaagaggctgagacaggaggttattttcaattttattttggaattaaatacttttttccctttattactgttgtagtccctcacttggatatacctctgttttcacgatagaaataagggaggtctagagcttctattccttggccattgtcaacggagagctggccaagtcttcacaaacccttgcaacattgcctgaagtttatggaataagatgtattctcactcccttgatctcaagggcgtaactctggaagcacagcttgactacacgtcatttttaccaatgattttcaggtgacctgggctaagtcatttaaactgggtctttataaaagtaaaaggccaacatttaattattttgcaaagcaacctaagagctaaagatgtaatttttcttgcaattgtaaatcttttgtgtctcctgaagacttcccttaaaattagctctgagtgaaaaatcaaaagagacaaaagacatcttcgaatccatatttcaagcctggtagaattggcttttctagcagaacctttccaaaagttttatattgagattcataacaacaccaagaattgattttgtagccaacattcattcaatactgttatatcagaggagtaggagagaggaaacatttgacttatctggaaaagcaaaatgtacttaagaataagaataacatggtccattcacctttatgttatagatatgtctttgtgtaaatcatttgttttgagttttcaaagaatagcccattgttcattcttgtgctgtacaatgaccactgttattgttactttgacttttcagagcacacccttcctctggtttttgtatatttattgatggatcaataataatgaggaaagcatgatatgtatattgctgagttgaaagcacttattggaaaatattaaaaggctaacattaaaagactaaaggaaacagaaaaaaaaaaaaaaaaa

SEQ ID NO: 49 - DNA, 2182 bp, Homo sapiens
acttccgcgggcacccaactgtgcgtctcctgcgcgctgacgtcaggtgcgtgcccctgtccggcagccgaggagaccccgcgcagtgctgccaacgccccggtggagaagctgaggtcatcatcagatttgaaatatttaaagtggatacaaaactatttcagcaatgcagacaattaagtgtgttgttgtgggcgatggtgctgttggtaaaacatgtctcctgatatcctacacaacaaacaaatttccatcggaatatgtaccgactgtttttgacaactatgcagtcacagttatgattggtggagaaccatatactcttggactttttgatactgcagggcaagaggattatgacagattacgaccgctgagttatccacaaacagatgtatttctagtctgtttttcagtggtctctccatcttcatttgaaaacgtgaaagaaaagtgggtgcctgagataactcaccactgtccaaagactcctttcttgcttgttgggactcaaattgatctcagagatgacccctctactattgagaaacttgccaagaacaaacagaagcctatcactccagagactgctgaaaagctggcccgtgacctgaaggctgtcaagtatgtggagtgttctgcacttacacagaaaggcctaaagaatgtatttgacgaagcaatattggctgccctggagcctccagaaccgaagaagagccgcaggtgtgtgctgctatgaacatctctccagagccctttctgcacagctggtgtcggcatcatactaaaagcaatgtttaaatcaaactaaagattaaaaattaaaattcgtttttgcaataatgacaaatgccctgcacctacccacatgcactcgtgtgagacaaggcccataggtatggccccccccttccccctcccagtactagttaattttgagtaattgtattgtcagaaaagtgattagtactatttttttttgttgtttcaaaaaaaaaatttttgtgtgtgtgtgttttttttttttttttttttgttgtttaaaagcaaggcatgcttgtggatgactctgtaacagactaattggaattgttgaagctgctccctggttccactctggagagtaatctgggacatcttagtgttttgttttgtttttttccctcctcttttttttgggggggagtgtgtgtggggtttgttttttagtcttgtttttttaattcattaaccagtggttagcccttaaggggaggaggacggattgattccacattccacttcctagatctagtttagaaaacatgttccccatctggtgctcttaggaaggagtatagtaaatgcctcatttaataacatactcctttttgaaagttgccttttctctccacccttgagtagatccagtatttgatgaaactcatgaaagtgggtggagcccatcttgcccctcctcttttctaggacgcactatatgtgactgtgactttcaaggacatttgtttgccatttgctgatttttttgggaagttaatttctaacttctttcactgataaatgaagaaaagtattgcacctttgaaatgcaccaaatgaattgagtttgtaattaaaaaaatttttttccctttcagtcattgtcttatatgcttagcatagatttgcagctcagtagtatatggtgttcctagaatgcagctgaagacctgttatgtagaggaaatacgaggggtggtgctagaagacagacatctgtggaatgattcacatcctctcaagttaggaggatggaggcctgcttcattaagaagctgggggtagggtgggggtggggagaacacttaacaacatggggaccagtcaggggaatccccttatttctgttttgcatatgaggaaccctagagcagccaggtgaggctctctagtttaataaaaatcatggaaagactcttaatgcagactcttcttaagtgttaatagggattttttcagcttattttggttgcagtttccaatttttaaaaatgttgaggtaatctttcccaccttcccaaacctaattcttgtagatgcattagtgttgaaccaatgctttctcatgtctcaattctttgtatatgcattcttttcagatgtattaaacaaacaaaaacccttcaaaaaaaaaaaaaaa

SEQ ID NO: 50 - DNA, 4828 bp, Homo sapiens
agtggcgtcggaactgcaaagcacctgtgagcttgcggaagtcagttcagactccagcccgctccagcccggcccgacccgaccgcacccggcgcctgccctcgctcggcgtccccggccagccatgggcccttggagccgcagcctctcggcgctgctgctgctgctgcaggtctcctcttggctctgccaggagccggagccctgccaccctggctttgacgccgagagctacacgttcacggtgccccggcgccacctggagagaggccgcgtcctgggcagagtgaattttgaagattgcaccggtcgacaaaggacagcctatttttccctcgacacccgattcaaagtgggcacagatggtgtgattacagtcaaaaggcctctacggtttcataacccacagatccatttcttggtctacgcctgggactccacctacagaaagttttccaccaaagtcacgctgaatacagtggggcaccaccaccgccccccgccccatcaggcctccgtttctggaatccaagcagaattgctcacatttcccaactcctctcctggcctcagaagacagaagagagactgggttattcctcccatcagctgcccagaaaatgaaaaaggcccatttcctaaaaacctggttcagatcaaatccaacaaagacaaagaaggcaaggttttctacagcatcactggccaaggagctgacacaccccctgttggtgtctttattattgaaagagaaacaggatggctgaaggtgacagagcctctggatagagaacgcattgccacatacactctcttctctcacgctgtgtcatccaacgggaatgcagttgaggatccaatggagattttgatcacggtaaccgatcagaatgacaacaagcccgaattcacccaggaggtctttaaggggtctgtcatggaaggtgctcttccaggaacctctgtgatggaggtcacagccacagacgcggacgatgatgtgaacacctacaatgccgccatcgcttacaccatcctcagccaagatcctgagctccctgacaaaaatatgttcaccattaacaggaacacaggagtcatcagtgtggtcaccactgggctggaccgagagagtttccctacgtataccctggtggttcaagctgctgaccttcaaggtgaggggttaagcacaacagcaacagctgtgatcacagtcactgacaccaacgataatcctccgatcttcaatcccaccacgtacaagggtcaggtgcctgagaacgaggctaacgtcgtaatcaccacactgaaagtgactgatgctgatgcccccaataccccagcgtgggaggctgtatacaccatattgaatgatgatggtggacaatttgtcgtcaccacaaatccagtgaacaacgatggcattttgaaaacagcaaagggcttggattttgaggccaagcagcagtacattctacacgtagcagtgacgaatgtggtaccttttgaggtctctctcaccacctccacagccaccgtcaccgtggatgtgctggatgtgaatgaagcccccatctttgtgcctcctgaaaagagagtggaagtgtccgaggactttggcgtgggccaggaaatcacatcctacactgcccaggagccagacacatttatggaacagaaaataacatatcggatttggagagacactgccaactggctggagattaatccggacactggtgccatttccactcgggctgagctggacagggaggattttgagcacgtgaagaacagcacgtacacagccctaatcatagctacagacaatggttctccagttgctactggaacagggacacttctgctgatcctgtctgatgtgaatgacaacgcccccataccagaacctcgaactatattcttctgtgagaggaatccaaagcctcaggtcataaacatcattgatgcagaccttcctcccaatacatctcccttcacagcagaactaacacacggggcgagtgccaactggaccattcagtacaacgacccaacccaagaatctatcattttgaagccaaagatggccttagaggtgggtgactacaaaatcaatctcaagctcatggataaccagaataaagaccaagtgaccaccttagaggtcagcgtgtgtgactgtgaaggggccgccggcgtctgtaggaaggcacagcctgtcgaagcaggattgcaaattcctgccattctggggattcttggaggaattcttgctttgctaattctgattctgctgctcttgctgtttcttcggaggagagcggtggtcaaagagcccttactgcccccagaggatgacacccgggacaacgtttattactatgatgaagaaggaggcggagaagaggaccaggactttgacttgagccagctgcacaggggcctggacgctcggcctgaagtgactcgtaacgacgttgcaccaaccctcatgagtgtcccccggtatcttccccgccctgccaatcccgatgaaattggaaattttattgatgaaaatctgaaagcggctgatactgaccccacagccccgccttatgattctctgctcgtgtttgactatgaaggaagcggttccgaagctgctagtctgagctccctgaactcctcagagtcagacaaagaccaggactatgactacttgaacgaatggggcaatcgcttcaagaagctggctgacatgtacggaggcggcgaggacgactaggggactcgagagaggcgggccccagacccatgtgctgggaaatgcagaaatcacgttgctggtggtttttcagctcccttcccttgagatgagtttctggggaaaaaaaagagactggttagtgatgcagttagtatagctttatactctctccactttatagctctaataagtttgtgttagaaaagtttcgacttatttcttaaagcttttttttttttcccatcactctttacatggtggtgatgtccaaaagatacccaaattttaatattccagaagaacaactttagcatcagaaggttcacccagcaccttgcagattttcttaaggaattttgtctcacttttaaaaagaaggggagaagtcagctactctagttctgttgttttgtgtatataattttttaaaaaaaatttgtgtgcttctgctcattactacactggtgtgtccctctgcctttttttttttttttaagacagggtctcattctatcggccaggctggagtgcagtggtgcaatcacagctcactgcagccttgtcctcccaggctcaagctatccttgcacctcagcctcccaagtagctgggaccacaggcatgcaccactacgcatgactaattttttaaatatttgagacggggtctccctgtgttacccaggctggtctcaaactcctgggctcaagtgatcctcccatcttggcctcccagagtattgggattacagacatgagccactgcacctgcccagctccccaactccctgccattttttaagagacagtttcgctccatcgcccaggcctgggatgcagtgatgtgatcatagctcactgtaacctcaaactctggggctcaagcagttctcccaccagcctcctttttatttttttgtacagatggggtcttgctatgttgcccaagctggtcttaaactcctggcctcaagcaatccttctgccttggccccccaaagtgctgggattgtgggcatgagctgctgtgcccagcctccatgttttaatatcaactctcactcctgaattcagttgctttgcccaagataggagttctctgatgcagaaattattgggctcttttagggtaagaagtttgtgtctttgtctggccacatcttgactaggtattgtctactctgaagacctttaatggcttccctctttcatctcctgagtatgtaacttgcaatgggcagctatccagtgacttgttctgagtaagtgtgttcattaatgtttatttagctctgaagcaagagtgatatactccaggacttagaatagtgcctaaagtgctgcagccaaagacagagcggaactatgaaaagtgggcttggagatggcaggagagcttgtcattgagcctggcaatttagcaaactgatgctgaggatgattgaggtgggtctacctcatctctgaaaattctggaaggaatggaggagtctcaacatgtgtttctgacacaagatccgtggtttgtactcaaagcccagaatccccaagtgcctgcttttgatgatgtctacagaaaatgctggctgagctgaacacatttgcccaattccaggtgtgcacagaaaaccgagaatattcaaaattccaaattttttcttaggagcaagaagaaaatgtggccctaaagggggttagttgaggggtagggggtagtgaggatcttgatttggatctctttttatttaaatgtgaatttcaacttttgacaatcaaagaaaagacttttgttgaaatagctttactgtttctcaagtgttttggagaaaaaaatcaaccctgcaatcactttttggaattgtcttgatttttcggcagttcaagctatatcgaatatagttctgtgtagagaatgtcactgtagttttgagtgtatacatgtgtgggtgctgataattgtgtattttctttgggggtggaaaaggaaaacaattcaagctgagaaaagtattctcaaagatgcatttttataaattttattaaacaattttgttaaaccataaaaaaaaaaaaa

SEQ ID NO: 51 - DNA, 4122 bp, Homo sapiens
tttgtcatcagctcgctctccattggcggggagcggagagcagcgaagaagggggtggggaggggaggggaagggaagggggtggaaactgcctggagccgtttctccgcgccgctgttggtgctgccgctgcctcctcctcctccgccgccgccgccgccgccgccgcctcctccggctcttcgctcggcccctctccgcctccatgtgccggatagcgggagcgctgcggaccctgctgccgctgctggcggccctgcttcaggcgtctgtagaggcttctggtgaaatcgcattatgcaagactggatttcctgaagatgtttacagtgcagtcttatcgaaggatgtgcatgaaggacagcctcttctcaatgtgaagtttagcaactgcaatggaaaaagaaaagtacaatatgagagcagtgagcctgcagattttaaggtggatgaagatggcatggtgtatgccgtgagaagctttccactctcttctgagcatgccaagttcctgatatatgcccaagacaaagagacccaggaaaagtggcaagtggcagtaaaattgagcctgaagccaaccttaactgaggagtcagtgaaggagtcagcagaagttgaagaaatagtgttcccaagacaattcagtaagcacagtggccacctacaaaggcagaagagagactgggtcatccctccaatcaacttgccagaaaactccaggggaccttttcctcaagagcttgtcaggatcaggtctgatagagataaaaacctttcactgcggtacagtgtaactgggccaggagctgaccagcctccaactggtatcttcattatcaaccccatctcgggtcagctgtcggtgacaaagcccctggatcgcgagcagatagcccggtttcatttgagggcacatgcagtagatattaatggaaatcaagtggagaaccccattgacattgtcatcaatgttattgacatgaatgacaacagacctgagttcttacaccaggtttggaatgggacagttcctgagggatcaaagcctggaacatatgtgatgaccgtaacagcaattgatgctgacgatcccaatgccctcaatgggatgttgaggtacagaatcgtgtctcaggctccaagcaccccttcacccaacatgtttacaatcaacaatgagactggtgacatcatcacagtggcagctggacttgatcgagaaaaagtgcaacagtatacgttaataattcaagctacagacatggaaggcaatcccacatatggcctttcaaacacagccacggccgtcatcacagtgacagatgtcaatgacaatcctccagagtttactgccatgacgttttatggtgaagttcctgagaacagggtagacatcatagtagctaatctaactgtgaccgataaggatcaaccccatacaccagcctggaacgcagtgtacagaatcagtggcggagatcctactggacggttcgccatccagaccgacccaaacagcaacgacgggttagtcaccgtggtcaaaccaatcgactttgaaacaaataggatgtttgtccttactgttgctgcagaaaatcaagtgccattagccaagggaattcagcacccgcctcagtcaactgcaaccgtgtctgttacagttattgacgtaaatgaaaacccttattttgcccccaatcctaagatcattcgccaagaagaagggcttcatgccggtaccatgttgacaacattcactgctcaggacccagatcgatatatgcagcaaaatattagatacactaaattatctgatcctgccaattggctaaaaatagatcctgtgaatggacaaataactacaattgctgttttggaccgagaatcaccaaatgtgaaaaacaatatatataatgctactttccttgcttctgacaatggaattcctcctatgagtggaacaggaacgctgcagatctatttacttgatattaatgacaatgcccctcaagtgttacctcaagaggcagagacttgcgaaactccagaccccaattcaattaatattacagcacttgattatgacattgatccaaatgctggaccatttgcttttgatcttcctttatctccagtgactattaagagaaattggaccatcactcggcttaatggtgattttgctcagcttaatttaaagataaaatttcttgaagctggtatctatgaagttcccatcataatcacagattcgggtaatcctcccaaatcaaatatttccatcctgcgcgtgaaggtttgccagtgtgactccaacggggactgcacagatgtggacaggattgtgggtgcggggcttggcaccggtgccatcattgccatcctgctctgcatcatcatcctgcttatccttgtgctgatgtttgtggtatggatgaaacgccgggataaagaacgccaggccaaacaacttttaattgatccagaagatgatgtaagagataatattttaaaatatgatgaagaaggtggaggagaagaagaccaggactatgacttgagccagctgcagcagcctgacactgtggagcctgatgccatcaagcctgtgggaatccgacgaatggatgaaagacccatccacgctgagccccagtatccggtccgatctgcagccccacaccctggagacattggggacttcattaatgagggccttaaagcggctgacaatgaccccacagctccaccatatgactccctgttagtgtttgactatgaaggcagtggctccactgctgggtccttgagctcccttaattcctcaagtagtggtggtgagcaggactatgattacctgaacgactgggggccacggttcaagaaacttgctgacatgtatggtggaggtgatgactgaacttcagggtgaacttggtttttggacaagtacaaacaatttcaactgatattcccaaaaagcattcagaagctaggctttaactttgtagtctactagcacagtgcttgctggaggctttggcataggctgcaaaccaatttgggctcagagggaatatcagtgatccatactgtttggaaaaacactgagctcagttacacttgaattttacagtacagaagcactgggattttatgtgcctttttgtacctttttcagattggaattagttttctgtttaaggctttaatggtactgatttctgaaacgataagtaaaagacaaaatattttgtggtgggagcagtaagttaaaccatgatatgcttcaacacgcttttgttacattgcatttgcttttattaaaatacaaaattaaacaaacaaaaaaactcatggagcgattttattatcttgggggatgagaccatgagattggaaaatgtacattacttctagttttagactttagtttgttttttttttttcactaaaatcttaaaacttactcagctggttgcaaataaagggagttttcatatcaccaatttgtagcaaaattgaattttttcataaactagaatgttagacacattttggtcttaatccatgtacacttttttatttctgtatttttccacttcactgtaaaaatagtatgtgtacataatgttttattggcatagtctatggagaagtgcagaaacttcagaacatgtgtatgtattatttggactatggattcaggttttttgcatgtttatatctttcgttatggataaagtatttacaaaacagtgacatttgattcaattgttgagctgtagttagaatactcaatttttaatttttttaatttttttattttttattttctttttggtttggggagggagaaaagttcttagcacaaatgttttacataatttgtaccaaaaaaaaaaaaaaggaaaggaaagaaaggggtggcctgacactggtggcactactaagtgtgtgttttttaaaaaaaaaaatggaaaaaaaaaagcttttaaactggagagacttctgacaacagctttgcctctgtattgtgtaccagaatataaatgatacacctctgaccccagcgttctgaataaaatgctaattttggaaaaaaaaaaaaaaaaa

SEQ ID NO: 52 - DNA, 3649 bp, Homo sapiens
cccgctgtagccgcgtgtgggaggacgcacgggcctgcttcaaagctttgggataacagcgcctccgggggataatgaatgcggagcctccgttttcagtcgacttcagatgtgtctccacttttttccgctgtagccgcaaggcaaggaaacatttctcttcccgtactgaggaggctgaggagtgcactgggtgttcttttctcctctaacccagaactgcgagacagaggctgagtccctgtaaagaacagctccagaaaagccaggagagcgcaggagggcatccgggaggccaggaggggttcgctggggcctcaaccgcacccacatcggtcccacctgcgagggggcgggacctcgtggcgctggaccaatcagcacccacctgcgctcacctggcctcctcccgctggctcccgggggctgcggtgctcaaaggggcaagagctgagcggaacaccggcccgccgtcgcggcagctgcttcacccctctctctgcagccatggggctccctcgtggacctctcgcgtctctcctccttctccaggtttgctggctgcagtgcgcggcctccgagccgtgccgggcggtcttcagggaggctgaagtgaccttggaggcgggaggcgcggagcaggagcccggccaggcgctggggaaagtattcatgggctgccctgggcaagagccagctctgtttagcactgataatgatgacttcactgtgcggaatggcgagacagtccaggaaagaaggtcactgaaggaaaggaatccattgaagatcttcccatccaaacgtatcttacgaagacacaagagagattgggtggttgctccaatatctgtccctgaaaatggcaagggtcccttcccccagagactgaatcagctcaagtctaataaagatagagacaccaagattttctacagcatcacggggccgggggcagacagcccccctgagggtgtcttcgctgtagagaaggagacaggctggttgttgttgaataagccactggaccgggaggagattgccaagtatgagctctttggccacgctgtgtcagagaatggtgcctcagtggaggaccccatgaacatctccatcatcgtgaccgaccagaatgaccacaagcccaagtttacccaggacaccttccgagggagtgtcttagagggagtcctaccaggtacttctgtgatgcaggtgacagccacggatgaggatgatgccatctacacctacaatggggtggttgcttactccatccatagccaagaaccaaaggacccacacgacctcatgttcaccattcaccggagcacaggcaccatcagcgtcatctccagtggcctggaccgggaaaaagtccctgagtacacactgaccatccaggccacagacatggatggggacggctccaccaccacggcagtggcagtagtggagatccttgatgccaatgacaatgctcccatgtttgacccccagaagtacgaggcccatgtgcctgagaatgcagtgggccatgaggtgcagaggctgacggtcactgatctggacgcccccaactcaccagcgtggcgtgccacctaccttatcatgggcggtgacgacggggaccattttaccatcaccacccaccctgagagcaaccagggcatcctgacaaccaggaagggtttggattttgaggccaaaaaccagcacaccctgtacgttgaagtgaccaacgaggccccttttgtgctgaagctcccaacctccacagccaccatagtggtccacgtggaggatgtgaatgaggcacctgtgtttgtcccaccctccaaagtcgttgaggtccaggagggcatccccactggggagcctgtgtgtgtctacactgcagaagaccctgacaaggagaatcaaaagatcagctaccgcatcctgagagacccagcagggtggctagccatggacccagacagtgggcaggtcacagctgtgggcaccctcgaccgtgaggatgagcagtttgtgaggaacaacatctatgaagtcatggtcttggccatggacaatggaagccctcccaccactggcacgggaacccttctgctaacactgattgatgtcaatgaccatggcccagtccctgagccccgtcagatcaccatctgcaaccaaagccctgtgcgccaggtgctgaacatcacggacaaggacctgtctccccacacctcccctttccaggcccagctcacagatgactcagacatctactggacggcagaggtcaacgaggaaggtgacacagtggtcttgtccctgaagaagttcctgaagcaggatacatatgacgtgcacctttctctgtctgaccatggcaacaaagagcagctgacggtgatcagggccactgtgtgcgactgccatggccatgtcgaaacctgccctggaccctggaagggaggtttcatcctccctgtgctgggggctgtcctggctctgctgttcctcctgctggtgctgcttttgttggtgagaaagaagcggaagatcaaggagcccctcctactcccagaagatgacacccgtgacaacgtcttctactatggcgaagaggggggtggcgaagaggaccaggactatgacatcacccagctccaccgaggtctggaggccaggccggaggtggttctccgcaatgacgtggcaccaaccatcatcccgacacccatgtaccgtcctcggccagccaacccagatgaaatcggcaactttataattgagaacctgaaggcggctaacacagaccccacagccccgccctacgacaccctcttggtgttcgactatgagggcagcggctccgacgccgcgtccctgagctccctcacctcctccgcctccgaccaagaccaagattacgattatctgaacgagtggggcagccgcttcaagaagctggcagacatgtacggtggcggggaggacgactaggcggcctgcctgcagggctggggaccaaacgtcaggccacagagcatctccaaggggtctcagttcccccttcagctgaggacttcggagcttgtcaggaagtggccgtagcaacttggcggagacaggctatgagtctgacgttagagtggtggcttccttagcctttcaggatggaggaatgtgggcagtttgacttcagcactgaaaacctctccacctgggccagggttgcctcagaggccaagtttccagaagcctcttacctgccgtaaaatgctcaaccctgtgtcctgggcctgggcctgctgtgactgacctacagtggactttctctctggaatggaaccttcttaggcctcctggtgcaacttaatttttttttttaatgctatcttcaaaacgttagagaaagttcttcaaaagtgcagcccagagctgctgggcccactggccgtcctgcatttctggtttccagaccccaatgcctcccattcggatggatctctgcgtttttatactgagtgtgcctaggttgccccttattttttattttccctgttgcgttgctatagatgaagggtgaggacaatcgtgtatatgtactagaacttttttattaaagaaacttttcccagaaaaaaaaaaaaaa

SEQ ID NO: 53 - DNA, 4098 bp, Homo sapiens
gacggtcggctgacaggctccacagagctccactcacgctcaggccctggacggacaggcagtccaacggaacagaaacatccctcagccccacaggcacgatctgttcctcctgggaagatgcagaggctcatgatgctcctcgccacatcgggcgcctgcctgggcctgctggcagtggcagcagtggcagcagcaggtgctaaccctgcccaacgggacacccacagcctgctgcccacccaccggcgccaaaagagagattggatttggaaccagatgcacattgatgaagagaaaaacacctcacttccccatcatgtaggcaagatcaagtcaagcgtgagtcgcaagaatgccaagtacctgctcaaaggagaatatgtgggcaaggtcttccgggtcgatgcagagacaggagacgtgttcgccattgagaggctggaccgggagaatatctcagagtaccacctcactgctgtcattgtggacaaggacactggtgaaaacctggagactccttccagcttcaccatcaaagttcatgacgtgaacgacaactggcctgtgttcacgcatcggttgttcaatgcgtccgtgcctgagtcgtcggctgtggggacctcagtcatctctgtgacagcagtggatgcagacgaccccactgtgggagaccacgcctctgtcatgtaccaaatcctgaaggggaaagagtattttgccatcgataattctggacgtattatcacaataacgaaaagcttggaccgagagaagcaggccaggtatgagatcgtggtggaagcgcgagatgcccagggcctccggggggactcgggcacggccaccgtgctggtcactctgcaagacatcaatgacaacttccccttcttcacccagaccaagtacacatttgtcgtgcctgaagacacccgtgtgggcacctctgtgggctctctgtttgttgaggacccagatgagccccagaaccggatgaccaagtacagcatcttgcggggcgactaccaggacgctttcaccattgagacaaaccccgcccacaacgagggcatcatcaagcccatgaagcctctggattatgaatacatccagcaatacagcttcatcgtcgaggccacagaccccaccatcgacctccgatacatgagccctcccgcgggaaacagagcccaggtcattatcaacatcacagatgtggacgagccccccattttccagcagcctttctaccacttccagctgaaggaaaaccagaagaagcctctgattggcacagtgctggccatggaccctgatgcggctaggcatagcattggatactccatccgcaggaccagtgacaagggccagttcttccgagtcacaaaaaagggggacatttacaatgagaaagaactggacagagaagtctacccctggtataacctgactgtggaggccaaagaactggattccactggaacccccacaggaaaagaatccattgtgcaagtccacattgaagttttggatgagaatgacaatgccccggagtttgccaagccctaccagcccaaagtgtgtgagaacgctgtccatggccagctggtcctgcagatctccgcaatagacaaggacataacaccacgaaacgtgaagttcaaattcaccttgaatactgagaacaactttaccctcacggataatcacgataacacggccaacatcacagtcaagtatgggcagtttgaccgggagcataccaaggtccacttcctacccgtggtcatctcagacaatgggatgccaagtcgcacgggcaccagcacgctgaccgtggccgtgtgcaagtgcaacgagcagggcgagttcaccttctgcgaggatatggccgcccaggtgggcgtgagcatccaggcagtggtagccatcttactctgcatcctcaccatcacagtgatcaccctgctcatcttcctgcggcggcggctccggaagcaggcccgcgcgcacggcaagagcgtgccggagatccacgagcagctggtcacctacgacgaggagggcggcggcgagatggacaccaccagctacgatgtgtcggtgctcaactcggtgcgccgcggcggggccaagcccccgcggcccgcgctggacgcccggccttccctctatgcgcaggtgcagaagccaccgaggcacgcgcctggggcacacggagggcccggggagatggcagccatgatcgaggtgaagaaggacgaggcggaccacgacggcgacggccccccctacgacacgctgcacatctacggctacgagggctccgagtccatagccgagtccctcagctccctgggcaccgactcatccgactctgacgtggattacgacttccttaacgactggggacccaggtttaagatgctggctgagctgtacggctcggacccccgggaggagctgctgtattaggcggccgaggtcactctgggcctggggacccaaaccccctgcagcccaggccagtcagacgccaggcaccacagcctccaaaaatggcagtgactccccagcccagcaccccttcctcgtgggtcccagagacctcatcagccttgggatagcaaactccaggttcctgaaatatccaggaatatatgtcagtgatgactattctcaaatgctggcaaatccaggctggtgttctgtctgggctcagacatccacataaccctgtcacccacagaccgccgtctaactcaaagacttcctctggctccccaaggctgcaaagcaaaacagactgtgtttaactgctgcagggtctttttctagggtccctgaacgccctggtaaggctggtgaggtcctggtgcctatctgcctggaggcaaaggcctggacagcttgacttgtggggcaggattctctgcagcccattcccaagggagactgaccatcatgccctctctcgggagccctagccctgctccaactccatactccactccaagtgccccaccactccccaacccctctccaggcctgtcaagagggaggaaggggccccatggcagctcctgaccttgggtcctgaagtgacctcactggcctgccatgccagtaactgtgctgtactgagcactgaaccacattcagggaaatggcttattaaactttgaagcaactgtgaattcattctggaggggcagtggagatcaggagtgacagatcacagggtgagggccacctccacacccaccccctctggagaaggcctggaagagctgagaccttgctttgagactcctcagcacccctccagttttgcctgagaaggggcagatgttcccggagcagaagacgtctccccttctctgcctcacctggtcgccaatccatgctctctttcttttctctgtctactccttatcccttggtttagaggaacccaagatgtggcctttagcaaaactggacaatgtccaaacccactcatgactgcatgacggagccgagccatgtgtctttacacctcgctgttgtcacatctcagggaactgaccctcaggcacaccttgcagaaggcaaggccctgccctgcccaacctctgtggtcacccatgcatcttccactggaacgtttcactgcaaacacaccttggagaagtggcatcagtcaacagagaggggcagggaaggagacaccaagctcacccttcgtcatggaccgaggttcccactctgggcaaagcccctcacactgcaagggattgtagataacactgacttgtttgttttaaccaataactagcttcttataatgatttttttactaatgatacttacaagtttctagctctcacagacatatagaataagggtttttgcataataagcaggttgttatttaggttaacaatattaattcaggttttttagttggaaaaacaattcctgtaaccttctattttctataattgtagtaattgctctacagataatgtctatatattggccaaactggtgcatgacaagtactgtatttttttatacctaaataaagaaaaatctttagcctgggcaacaaaaaaa

SEQ ID NO: 54 - DNA, 2281 bp, Homo sapiens
agctgaggtgtgagcagctgccgaagtcagttccttgtggagccggagctgggcgcggattcgccgaggcaccgaggcactcagaggaggtgagagagcggcggcagacaacaggggaccccgggccggcggcccagagccgagccaagcgtgcccgcgtgtgtccctgcgtgtccgcgaggatgcgtgttcgcgggtgtgtgctgcgttcacaggtgtttctgcggcaggcgccatgtcagaaccggctggggatgtccgtcagaacccatgcggcagcaaggcctgccgccgcctcttcggcccagtggacagcgagcagctgagccgcgactgtgatgcgctaatggcgggctgcatccaggaggcccgtgagcgatggaacttcgactttgtcaccgagacaccactggagggtgacttcgcctgggagcgtgtgcggggccttggcctgcccaagctctaccttcccacggggccccggcgaggccgggatgagttgggaggaggcaggcggcctggcacctcacctgctctgctgcaggggacagcagaggaagaccatgtggacctgtcactgtcttgtacccttgtgcctcgctcaggggagcaggctgaagggtccccaggtggacctggagactctcagggtcgaaaacggcggcagaccagcatgacagatttctaccactccaaacgccggctgatcttctccaagaggaagccctaatccgcccacaggaagcctgcagtcctggaagcgcgagggcctcaaaggcccgctctacatcttctgccttagtctcagtttgtgtgtcttaattattatttgtgttttaatttaaacacctcctcatgtacataccctggccgccccctgccccccagcctctggcattagaattatttaaacaaaaactaggcggttgaatgagaggttcctaagagtgctgggcatttttattttatgaaatactatttaaagcctcctcatcccgtgttctccttttcctctctcccggaggttgggtgggccggcttcatgccagctacttcctcctccccacttgtccgctgggtggtaccctctggaggggtgtggctccttcccatcgctgtcacaggcggttatgaaattcaccccctttcctggacactcagacctgaattctttttcatttgagaagtaaacagatggcactttgaaggggcctcaccgagtgggggcatcatcaaaaactttggagtcccctcacctcctctaaggttgggcagggtgaccctgaagtgagcacagcctagggctgagctggggacctggtaccctcctggctcttgatacccccctctgtcttgtgaaggcagggggaaggtggggtcctggagcagaccaccccgcctgccctcatggcccctctgacctgcactggggagcccgtctcagtgttgagccttttccctctttggctcccctgtaccttttgaggagccccagctacccttcttctccagctgggctctgcaattcccctctgctgctgtccctcccccttgtcctttcccttcagtaccctctcagctccaggtggctctgaggtgcctgtcccacccccacccccagctcaatggactggaaggggaagggacacacaagaagaagggcaccctagttctacctcaggcagctcaagcagcgaccgccccctcctctagctgtgggggtgagggtcccatgtggtggcacaggcccccttgagtggggttatctctgtgttaggggtatatgatgggggagtagatctttctaggagggagacactggcccctcaaatcgtccagcgaccttcctcatccaccccatccctccccagttcattgcactttgattagcagcggaacaaggagtcagacattttaagatggtggcagtagaggctatggacagggcatgccacgtgggctcatatggggctgggagtagttgtctttcctggcactaacgttgagcccctggaggcactgaagtgcttagtgtacttggagtattggggtctgaccccaaacaccttccagctcctgtaacatactggcctggactgttttctctcggctccccatgtgtcctggttcccgtttctccacctagactgtaaacctctcgagggcagggaccacaccctgtactgttctgtgtctttcacagctcctcccacaatgctgaatatacagcaggtgctcaataaatgattcttagtgactttaaaaaaaaaaaaaaaaaaaa

SEQ ID NO: 55 - DNA, 1154 bp, Homo sapiens
cgctcagggaaggcgggtgcgcgcctgcggggcggagatgggcagggggcggtgcgtgggtcccagtctgcagttaagggggcaggagtggcgctgctcacctctggtgccaaagggcggcgcagcggctgccgagctcggccctggaggcggcgagaacatggtgcgcaggttcttggtgaccctccggattcggcgcgcgtgcggcccgccgcgagtgagggttttcgtggttcacatcccgcggctcacgggggagtgggcagcgccaggggcgcccgccgctgtggccctcgtgctgatgctactgaggagccagcgtctagggcagcagccgcttcctagaagaccaggtcatgatgatgggcagcgcccgagtggcggagctgctgctgctccacggcgcggagcccaactgcgccgaccccgccactctcacccgacccgtgcacgacgctgcccgggagggcttcctggacacgctggtggtgctgcaccgggccggggcgcggctggacgtgcgcgatgcctggggccgtctgcccgtggacctggctgaggagctgggccatcgcgatgtcgcacggtacctgcgcgcggctgcggggggcaccagaggcagtaaccatgcccgcatagatgccgcggaaggtccctcagacatccccgattgaaagaaccagagaggctctgagaaacctcgggaaacttagatcatcagtcaccgaaggtcctacagggccacaactgcccccgccacaacccaccccgctttcgtagttttcatttagaaaatagagcttttaaaaatgtcctgccttttaacgtagatatatgccttcccccactaccgtaaatgtccatttatatcattttttatatattcttataaaaatgtaaaaaagaaaaacaccgcttctgccttttcactgtgttggagttttctggagtgagcactcacgccctaagcgcacattcatgtgggcatttcttgcgagcctcgcagcctccggaagctgtcgacttcatgacaagcattttgtgaactagggaagctcaggggggttactggcttctcttgagtcacactgctagcaaatggcagaaccaaagctcaaataaaaataaaataattttcattcattcactcaaaa

SEQ ID NO: 56 - DNA, 3878 bp, Homo sapiens
ggctccccactctgccagagcgaggcggggcagtgaggactccgcgacgcgtccgcaccctgcggccagagcggctttgagctcggctgcgtccgcgctaggcgctttttcccagaagcaatccaggcgcgcccgctggttcttgagcgccaggaaaagcccggagctaacgaccggccgctcggccactgcacggggccccaagccgcagaaggacgacgggagggtaatgaagctgagcccaggtctcctaggaaggagagagtgcgccggagcagcgtgggaaagaagggaagagtgtcgttaagtttacggccaacggtggattatccgggccgctgcgcgtctgggggctgcggaatgcgcgaggagaacaagggcatgcccagtgggggcggcagcgatgagggtctggccagcgccgcggcgcggggactagtggagaaggtgcgacagctcctggaagccggcgcggatcccaacggagtcaaccgtttcgggaggcgcgcgatccaggtcatgatgatgggcagcgcccgcgtggcggagctgctgctgctccacggcgcggagcccaactgcgcagaccctgccactctcacccgaccggtgcatgatgctgcccgggagggcttcctggacacgctggtggtgctgcaccgggccggggcgcggctggacgtgcgcgatgcctggggtcgtctgcccgtggacttggccgaggagcggggccaccgcgacgttgcagggtacctgcgcacagccacgggggactgacgccaggttccccagccgcccacaacgactttattttcttacccaatttcccacccccacccacctaattcgatgaaggctgccaacggggagcggcggaaagcctgtaagcctgcaagcctgtctgagactcacaggaaggaggagccgaccgggaataaccttccatacatttttttctttgtcttatctggccctcgacactcaccatgaagcgaaacacagagaagcggatttccagggatatttaggagtgtgtgacattccaggggtcgtttgcttttcagggttttctgagggaaagtgcatatgaaatccttgactggacctggtggctacgaatcttccgatggatgaatctcccactccagcgctgagtgggagaaggcagtgattagcacttgggtgacggcagtcgatgcgttcactccaatgtctgctgaggagttatggtgaacccacaacttaggccctagcggcagaaaggaaaacctgaagactgaggacaaagtggaggagggccgaggtgggcttcagtaagtccccggcggcgctttagtttgagcgcatggcaagtcacatgcgtaaacgacactctctggaagccctggagaccctcgcccaactccaccagatagcagaggggtaagagaggatgtgcaagcgacgacagatgctaaaatccctggatcacgacgctgcagagcacctttgcacaggatgctggcctttgctcttactacactgaggagagattcccgcgggttccgcaggcagactacacaggatgaggtggtggagtggagtgagagcaattgtaacggttaactgtaacgttttctttcacacacacacacacacacacacacacacatgctaggatgcggaaatccccttatgacttgctactttttgattttgtgatattttgtactttttagttgttcagcaactgtcttatttaatggggagattttaagtaacataactagtggctctcagttaaaatgtgaggaagaactacagctcttaaatgtagcaatggcactgttgcaaactcagtgcaaacgcctagattgctttcttcttaacctatttatttctttgttaaatttttctgattgtttcctttatagagtgtctcagggtgcagaggtcagactaagaaatattccaaatgtcttttagaagatagatgcacttatgcagtaaattatcttgggatagttcccaaaagattgctgaaaaagtagattgagtataaaaacttgaaaatatatgatggctcgtgggatgtcctactatcactgaacaaactaaaggtgcactgctttgggatttaatttccagggttgcttgatcattatatcattggaacaactgatacttcactactttaataaagaattaacagagattgaactccaagaggtgggtaatttggtttaaaaatacatgttcatgggtttaccactaactcctgagaaatgttaaaggttcacaggggttcccttctctcaatgtttgtaataattgctcataagcaataccagcaattcataaaaactgcttacttatgccatagaaaattaaacacaaagtgtatacatgtattatgcttctaaatgctcattctaccagatacacatttaaaagagaaaaaaggaacagaaacaagtcatttgagagtggagacttataagaaggagtacatttgagttgaatacacaaatctttacttctctaccaattcctattcccaaaatgaacatattactggggaaagttagttgagaatcagagcatatgttattggggaaaggatatgtttattgacacataatctgtaccaggtatgcattaaaatatatttgttaatttaatatttaaacctgagagataggtattgtttcccagatgaggacaatgaggcaaagaaatatcaagtaacttgccaaaggttacaagatattcattccatggatgcacaaagaagtgcatctagttccacagctgattatggttgtcttgcttttcttcccattgcaccagcttgtcctccaaaatcatgaatgatacacatgaagataactttttttaaaaaaaagcagaaatacacaatgatctcccttgtaagctcctaaggtggcttttctttctctaacttctagtaaatataaacggtttgtttgaaaactattttaaaatgtcaacaatatggagaataaccccccccaacacacctataaaaacccaaatttttggaacaaagataatggaacctccattttcaaactgaagcacagggacagaaaatatatttctagttatcacttaagcactcaatcattagaggctacaagaataatatttttaaagttacagtattttacaattattagaaaacattctatataaaagaagtcagttgatactttaaaatctcccatttggtttataaaatcccttaatttgacctctatatcttaaattccaagatgtttaaatttgctagttgcattatactgggtcatgaaaaattatcccttgaaatagatatgaaacatgttacttcatttctggtttaaataacttgtggaatctttcctaatgacaacctgatattaagggaaactaaagaaaatgttattgtggatcccacagtactatattacactgttttttttgtttgttttgttagttttttttatttaaagcaaacctcaaacattattgggtatcaattaccacctggttgtattgaaatagtaacttatcaatgccatgtaaaaattaattccattttcgaagccacctggcagacaggtttagctgtttcatcagcagcctaatatatactgttaaatttgttaaggatttcactttgaaggatacatgcaaaacatatagttactattttcatgagtcctgcttctagctccattgtggaatacagaaaattaaatatacctgttaagttcgtatctaaacctaagacattaccaaggtttgtacaaattctactacctgacatttattccaagaagatctggaaagttaaataaatttataaatttaataacaaaaaaaaaaaaaaaaaa

SEQ ID NO: 57 - DNA, 1206 bp, Homo sapiens
ctttgggcctcatcatttacaaaagaagcttgggcccctgacagcatgcatctcctcttatttcagctgctggtactcctgcctctaggaaagaccacacggcaccaggatggccgccagaatcagagttctctttcccccgtactcctgccaaggaatcaaagagagcttcccacaggcaaccatgaggaagctgaggagaagccagatctgtttgtcgcagtgccacaccttgtagccaccagccctgcaggggaaggccagaggcagagagagaagatgctgtccagatttggcaggttctggaagaagcctgagagagaaatgcatccatccagggactcagatagtgagcccttcccacctgggacccagtccctcatccagccgatagatggaatgaaaatggagaaatctcctcttcgggaagaagccaagaaattctggcaccacttcatgttcagaaaaactccggcttctcagggggtcatcttgcccatcaaaagccatgaagtacattgggagacctgcaggacagtgcccttcagccagactataacccacgaaggctgtgaaaaagtagttgttcagaacaacctttgctttgggaaatgcgggtctgttcattttcctggagccgcgcagcactcccatacctcctgctctcactgtttgcctgccaagttcaccacgatgcacttgccactgaactgcactgaactttcctccgtgatcaaggtggtgatgctggtggaggagtgccagtgcaaggtgaagacggagcatgaagatggacacatcctacatgctggctcccaggattcctttatcccaggagtttcagcttgaagagctatcccactattacctttgaaaagcaaaaccacaacagcaaagatgctgattattcagtctgaaaatgttaagtgggtacataacattttcagggaaaggtgacttgaaacgtagttttaaattagaacgatagaggaaatgatattagtctagttattggtacacgtttgagaccttgtctcagctctgccactaactagccgtagaatgttaagttgtaaaacctttctccatctaaagattttcatctataaatgacggacccgacctagatgattgctaaaatcctttccactactaatattccgtgatgcattttctccaagtttgggtaaaagccctccatctaaa

SEQ ID NO: 58 - DNA, 1260 bp, Homo sapiens
ggccggcgggaagactccgttacccagcgagcgaggcggcggcgcagggccagcggactccatttcccgtcggctcgcggtgggagcgccggaagcccgccccacccctcattgtgcggctcctactaaacggaaggggccgggagaggccgcgttcagtcgggtcccggcagcggctgcagcgctctcgtcttctgcggctctcggtgccctctccttttcgtttccggaaacatggcctccggtgtggctgtctctgatggtgtcatcaaggtgttcaacgacatgaaggtgcgtaagtcttcaacgccagaggaggtgaagaagcgcaagaaggcggtgctcttctgcctgagtgaggacaagaagaacatcatcctggaggagggcaaggagatcctggtgggcgatgtgggccagactgtcgacgacccctacgccacctttgtcaagatgctgccagataaggactgccgctatgccctctatgatgcaacctatgagaccaaggagagcaagaaggaggatctggtgtttatcttctgggcccccgagtctgcgccccttaagagcaaaatgatttatgccagctccaaggacgccatcaagaagaagctgacagggatcaagcatgaattgcaagcaaactgctacgaggaggtcaaggaccgctgcaccctggcagagaagctggggggcagtgccgtcatctccctggagggcaagcctttgtgagccccttctggccccctgcctggagcatctggcagccccacacctgcccttgggggttgcaggctgcccccttcctgccagaccggaggggctggggggatcccagcagggggagggcaatcccttcaccccagttgccaaacagaccccccaccccctggattttccttctccctccatcccttgacggttctggccttcccaaactgcttttgatcttttgattcctcttgggctgaagcagaccaagttccccccaggcaccccagttgtgggggagcctgtattttttttaacaacatccccattccccacctggtcctcccccttcccatgctgccaacttctaaccgcaatagtgactctgtgcttgtctgtttagttctgtgtataaatggaatgttgtggagatgacccctccctgtgccggctggttcctctcccttttcccctggtcacggctactcatggaagcaggaccagtaagggaccttcgattaaaaaaaaaaaagacaataataaaaa

SEQ ID NO: 59 - DNA, 3077 bp, Homo sapiens
gcggcccgccgagccccgccacctccctcgggctgcagctcccggcgtgccccgcactctccgctgcccacccgctcgcccgcccctccttctcctcccagtgccacagagccgaagcccgagctgccgccgcagccacagccgagggcactatggcttctggagttacagtgaatgatgaagtcatcaaagtttttaatgatatgaaagtaaggaaatcttctacacaagaggagatcaaaaagagaaagaaagcagttctcttctgtttaagcgatgacaaaagacaaataattgtagaggaagcaaagcagatcttggtgggtgacattggtgatactgtagaggacccctacacatcttttgtgaagttgctacctctgaatgattgccgatatgctttgtacgatgccacatacgaaacaaaagagtctaagaaagaagacctagtatttatattctgggctcctgaaagtgcacctttaaaaagcaagatgatttatgctagctctaaagatgccattaaaaagaaatttacaggtattaaacatgagtggcaagtaaatggcttggatgatattaaggaccgttcgacacttggagagaaattgggaggcaatgtagtagtttcacttgaaggaaaaccattataaaatgacagtcaagtgccatctggatcttaaggagcttccatttctccagctcagtccattggaatagtattaggttttggttttttgttgtatttccccctttccactgggcccttccaacacaatgaatgaaggaaatatcatttatttaagcagcctatcagtgattgccattagactgttgaatactgttacttttatatagaacccaaggaatgccttcctgtcatattttagccaaaacaactggttatatgcctcccttgcagcaagcactacaatgtatgtgatcgtcaatgtgaatagcttagaatactgcaaaggataagctaattgaatgccttgaaagtattatccactggtcagatggtcaacttttttcagtattatttatagttggcacttgattgcagttctgtgaggcttgagcattcatacacctcacctgccttggcaagcctattttagtgatatggcagcacggatataacactatgcattaaaagcactttttgtaataagtttaatatcctaaaaggaatgccaattaagttttgttaactgtgtcatcaacttatcctagtacctcagtgttcattcctgttacctgcatatcttcttaaaagaaatagctgttattaatgcctttttgttttccattgagtgtacactactgaataagtgtaggagttttatgtttaccatgtgagtcctgcaacactaaagatattttgaatatcagtcatgatggcaatttctgtataaaagagccttaaatggaacattgttttgagatcaaactccccaccctcacaaaaatggccacgttgcaataaaaattgtggcatattacagaacgttgccttgttttccttggaaattttgcaaaatgttatgtgaaacaacttctagggtaaaaacagctattactaatctctgcactggtcatttgagaattttttttgtacagcattcatgtgtgatattttccagatttgttggatctatttggtttaaaaagtattctatcttaaggccaactaatataaaataccattgttaaagaatggtacttttataaacattagtgtatttatttcctatgtgttaatatgaagatcagaaattattttttgcactttggcataaatacttttcaatatctgatttgttctctggataaattagcatagttatttttttattcacatttacatttctaagtagttgtatagtagaagcaggaagctcttattgcttatttggtcgtaatgaaaataatttgtaaaatgtcctttaaaagtttaatgatacttctgatgtttcggaacagtcatttcacctactatttctgaatatattttgcaaattgaattggaataggaattgataatagcagtcttaaacattagtagtgggatttggctatggtccagactgtgctccttatagagaatttgatctgctcagtgtgagcggtttgctgttagccagggctatttatggcaaacacatgcttttgtatcttgtcatagttatccacaaatggcaaaactggacttgattctactggtatgcaaaacaggcatgctagtaagcagtcagtcgtggctcagaacttaaccccatagctcagaggaatgcttttagcagaaaacaggaaagaaaatatcccttaaaaattttttttgaatgtgtggaagtaattttagtataattagattttttccatatttttgaaagatttttcagatgtgaacattaaaaatagggattaaatgtctaggcttccatttaaaattatatgaatggtttgggatctttttgcactgagcaattttatttcaggcttccagctgtccctgtgagttatcctggacatttcgatggtttttggtaaggccaaactctgataagcaaaacagagaatactgacgtatacttaaccatatgtgtaactgatacttggcaccatggaatttttcattgagttatttcctcattcttttaaaaaataagggactataaatcagttatgtagtatcttttgtttttgtagctgattccttaactttcttgtatgcctctagtaatttcagagattaaatattgctttaaactgtgatactttgatttgctagattgacaaaactgatactaatataattaagttcatctttgaaatacatctttgtgcgtagagccaaaaaaagagataaaattaataatagttcacttgttatttgagattaatttggcatttgaaatgatcattttattttacaatcatttataatgaatcaatgttccagttagctttaaaaggtatacggtgctaattagtaaaatattgaaggcaatattttactgctagcttgcaaagttatgagagtttaaaaaataaaatatatgaaaatatgtaaa

SEQ ID NO: 60 - DNA, 7525 bp, Homo sapiens
ggtgctggagagacagggagaggggcgaaccggccccccacagccactgcaggagttccaccatcttcctctgaagacgtagccatcttgctccatgaagggtgaatcgaaacgcatcaccctggtcctccagcagccacagtctggaggtccccaaggacatcggcatgttgtgctagggagtctaccaggcaagatagtgttacagggcaaccagctggcagccctgactcaagccaagaatgcccaagggcagcctgccaaggtagtaactatccagctgcaggtgcagcagccacagcaaaaaatccagattgtaccacaaccaccatcatcgcagccacagccccagcagccaccctccacccagccagtgactctgtcctctgtacagcaggctcagataatgggaccaggacaaagcccaggacaaagactttcagtaccagtcaaggtggtactgcagccacaggctggctcttcccaaggggcctcttctgggctctctgtagttaaagttctgagtgccagtgaagtggcagctttgtcatcaccagcaagctctgctcctcattcggggggaaagacaggaatggaggaaaaccgcagattggaacaccagaagaagcaagagaaagcaaatcggattgtagcagaggccattgcgagagcccgtgcccgcggtgagcagaacatacctcgagtcttaaatgaggacgagttgcccagcgttcggccagaggaggaaggcgagaagaaacgcaggaagaagagtgctggggagaggctgaaagaggagaagccaaagaagagtaaaacatctggtgcctccaaaacaaagggcaagagcaagctcaacaccatcactcctgtagtgggtaagaagagaaaacgtaatacctcatctgataattcagatgtggaagtcatgcctgcacagtcacctcgagaagatgaagaaagcagcattcagaagagacgctcaaaccgccaagttaagcgaaaaaaatatacagaggacctggatataaagatcacagatgatgaagaagaagaagaggtggatgtaactggtccaataaaacctgagcctatcctccctgaaccagtgcaagaaccagatggcgagactttgccttccatgcagttctttgtggagaatcccagtgaagaagatgcagccattgtagacaaagtgctttctatgcggattgtgaagaaggagctcccttctggacaatatactgaagcagaagaattctttgtcaagtacaagaactactcctatctgcattgtgaatgggctactatctcccaactagagaaggataagaggatacatcaaaaattaaagcgcttcaaaaccaaaatggctcagatgagacacttcttccatgaggatgaagagccctttaatccagactacgtagaggtggataggatattggatgagtctcacagtattgacaaggacaatggggagcccgttatttactacctggtgaaatggtgctctctgccctatgaggatagcacatgggagctaaaagaagatgttgatgagggcaagattcgagaatttaaacggattcagtcaaggcacccagaactcaaaagggtgaatcgtccgcaggcaagtgcctggaagaaattggagctatcacatgaatataaaaacagaaaccagctacgggaatatcagttggaaggggttaattggctgctctttaattggtataacaggcagaactgcatcctggctgatgagatgggattgggcaaaactattcagtccattgccttcttgcaggaagtatataatgtgggcatccatggtcccttcttggtcattgccccactgtccacaattactaactgggagcgagaatttaatacatggacagaaatgaacactattgtgtaccatggcagtctggccagcaggcagatgattcaacagtatgaaatgtactgcaaagattcacggggacgcctcatcccaggcgcatacaagtttgacgctctgatcaccacttttgagatgattttgtcagattgtcctgagcttcgtgaaattgaatggcgttgtgttatcattgatgaagcccatcgactgaaaaaccgtaattgcaagctgcttgatagtctcaagcacatggacctggaacacaaggtgctactcacaggaacaccattgcaaaatactgtagaagaactgtttagcttgcttcatttcttggaaccgtcacaatttccctcagaatcagagtttctcaaggactttggggatctcaagacagaggaacaggttcaaaagctacaggccattcttaagccaatgatgctgagaagactcaaagaggatgttgaaaaaaacttggcacccaaacaggaaacaattattgaagtagagctgactaatatccagaagaaatactatcgggctattttggagaagaatttctccttcctttccaaaggggcaggtcataccaacatgcctaatctacttaacacaatgatggagttgcgcaagtgctgcaaccacccatatctcatcaatggtgctgaagaaaaaatcctaacagaattccgtgaagcttgccatattatacctcatgactttcacctgcaggccatggttcgttcagccggcaaactggttcttattgacaagttgcttccaaagcttaaagctggtggccataaagttctgatcttctctcagatggtgcgctgcctagacatcctagaggattatttaatccagaggaggtacttatatgaacgtattgatgggcgagttagaggcaaccttcgacaggctgccattgaccgcttcagcaagcctgactcagaccgctttgtcttcttactgtgtacccgggctggtggacttggtattaatcttacagctgctgatacctgcatcatctttgattcagactggaatccacaaaatgacctgcaggcccaggcacgatgtcatcgaattgggcagagcaaagctgtgaaggtgtaccgcctcatcactcgtaattcctacgagagagagatgtttgataaggccagcctcaagttggggttggataaggctgtgcttcaatccatgagtggtcgggatggcaacattactggaatccaacagttctctaagaaggagattgaagatcttttaagaaaaggagcatatgcagccatcatggaggaagatgatgaaggctccaagttttgtgaagaggacattgaccagatcttgttaagacgaactacaaccatcaccattgaatctgaaggaaaaggttccacctttgctaaggcaagctttgttgcttctgaaaacaggacagatatttctttggatgaccccaacttttggcaaaagtgggccaaaaaggctgacctagacatggatctgctcaacagcaagaataatttggtaattgacacacctagagtacgaaaacaaacgcgccactttagcactctgaaagatgatgacctggtggaattctctgatttggaaagtgaggatgatgagcggccacgctcccgcagacatgaccgtcatcatgcctatgggcgcactgactgctttcgggtggaaaagcatctcctggtatatggttggggacgatggcgagatattttatctcatggacgcttcaagcgacgtatgactgaacgagatgtggagaccatttgtcgggccattctcgtgtactgtcttctacactaccgtggggatgaaaatattaaaggcttcatctgggacttgattagcccagctgaaaatggcaagacaaaagaattgcagaatcattcaggtctatctatccctgtgcctcgtggacgcaaaggaaaaaaagtaaagtcacaaagcacttttgatatccataaggcagattggatccggaaatataaccctgacactttgttccaagatgaaagttataagaagcacttgaaacatcagtgtaacaaggtactgttgcgggtacgaatgctatactacctgaggcaggaggttattggagaccaagcagaaaaggtgttagggggtgcgattgccagtgagattgacatatggttcccagtagtggatcaactggaggttccaacaacttggtgggacagtgaggctgacaagtcgctgctcattggagtctttaaacatggctatgagaaatataataccatgagggcagacccagccttatgtttcctagaaaaggctggccgaccagatgacaaagcaattgcagcagaacatcgagtgttggataacttctctgacatagtagaaggggttgactttgataaagattgtgaagatcctgaatataaaccactccaaggtcccccaaaggaccaagatgatgagggtgatcccttgatgatgatggatgaggagatctcagtgattgatggagatgaagcccaggtgacccaacagccaggccatttattctggcctccgggctctgccctaacagctaggcttcggcgtctagtaacagcgtatcagcgcagctacaagagagaacaaatgaagatagaggctgcagaacgtggggaccggcgaaggcggcgttgtgaagcagccttcaagctgaaagaaattgcacggcgggagaaacaacaacgatggacaaggcgtgaacaaactgatttttatcgagtggtgtctacgtttggtgtggaatatgaccctgacaccatgcagttccattgggatcgcttccgcacttttgctcgactagacaaaaagacagatgaaagccttaccaagtacttccatggctttgtggccatgtgccgccaagtatgccgccttcccccagcagctggagatgaaccccccgaccctaacctgttcattgagcccatcactgaggagagagcctcacggactctctaccgtatagaattgcttcggcgcttacgggaacaagttttatgccacccccttttggaagatcggctggcattgtgtcagcctcctggtcctgaattgcccaaatggtgggagcctgttcggcatgatggggagcttctaagaggggcagcccgccatggggtgagccaaacagactgcaacatcatgcaggacccagacttctcttttctggctgcccgtatgaattatatgcagaaccatcaagcaggagcaccagctccatccttgtcacgctgctctactccactgctgcaccagcagtatacctcacgcactgcctcaccactgcccctgcgcccagatgctcctgttgaaaagtcacccgaggagacagctacccaggtccccagtctggagagtctgactttaaagctagagcacgaggtggtggccaggagccgaccaaccccacaagactatgagatgcgagtatccccctctgatactacccctctggtttcccggagtgttccaccagtcaaactggaggatgaggatgattcggactctgagctggacttgagcaagctgtcaccatcttcttcttcttcctcatcctcatccagctccagctccagcactgatgagagtgaggatgagaaggaagagaagctaactgaccagtcccgctcaaagctctatgatgaagagagtctcctgtccctcactatgtcccaagatggattcccaaatgaagatggagaacaaatgacccctgagcttctgctactgcaggaaagacaaagagcctctgagtggcccaaggatcgtgtcctgataaaccgtattgacctcgtctgccaggctgtactctcagggaagtggccttctagccgtaggagccaggaaatggtaacaggaggaattttggggccaggcaaccacttgctagacagtccctcattgactcctggagaatatggtgactctccagtccccacaccacgaagtagtagtgcagcttccatggcagaggaggaagcatctgcagtcagcacagcggcagcccagttcaccaaacttcgccgaggcatggatgaaaaggagtttacagttcaaatcaaagatgaggaaggattgaagttaacattccagaagcacaagttgatggcgaatggagtaatgggagatggacatccactgtttcataagaagaaggggaacagaaagaagctagtagagctggaggtggagtgcatggaagagcctaatcaccttgatgtggacctggagacccggatccctgtcatcaataaggtggatggtactttgctggtgggtgaggatgcccctcgccgggctgaactggagatgtggttacagggtcatccagagtttgctgttgatccccgatttctagcgtatatggaggatcgcagaaaacagaagtggcaaagatgtaaaaaaaataataaggcagaattgaactgtttgggaatggaaccagtacagacagctaactctagaaatgggaaaaagggtcatcacactgaaacggtgttcaaccgggttttgccagggcctattgcaccagagagcagcaagaagcgggcccgtaggatgcgaccagacctttctaagatgatggccctcatgcagggtggaagcactgggtctctatctctgcataacacgttccaacacagcagtagtggcctacagtctgtgtcatctttgggtcacagcagtgccacttctgcatctttgccttttatgccatttgtgatgggtggtgcaccatcatcccctcatgtagactccagcaccatgcttcatcaccaccaccaccacccccacccccaccatcaccaccatcaccatccaggcttgagagcccctggctacccctcttcaccagtgactaccgcctctggtactaccttgcggttgccaccactgcaacctgaggaggatgacgatgaggatgaagaagatgatgatgacttatctcagggctatgatagctcagaaagggacttctcactcattgatgatcctatgatgccagctaactcagactccagtgaagatgctgatgactgaagccccagcatgggccccattgcttgggcggctgctgtattttcatttactctggcccttggactatggaaacgtgggaggggcaggggagatgtggggaagtccaggactccaggaggtgaaaaggaaaaaaaaaaaaaaatgtacctgattgctcccaattatgagaggattgggtgggcaggggaactcctaaaataatacatgaccacttcctcatttctggggaaggaaaggagactagagcagctggtgtgctcacccctccctagtcacctccattaaccacagactatgtagcgctggccctagcctctggcagagcctgttcctggccgaactgtggatacagctggagggtcaggaactgttaccttctttccccttggcattaataaatttaagttaatccttaaaaaaaaaaaaaaaaaaaaaaaaaaaaaaaaaaaaaaaaaaaaaaaaaaaaaaaaaaaaaaaaaaaaaaaaaaaaaaaaaaaaaaaaaaaaaaaaaaaaaaaaaaaa

SEQ ID NO: 61 - DNA, 3539 bp, Homo sapiens
ccggaaccggccttggaacaactgtggaacctgaggccgcttgccctcccgccccatggagcggcccccggggctgcggccgggcgcgggcgggccctgggagatgcgggagcggctgggcaccggcggcttcgggaacgtctgtctgtaccagcatcgggaacttgatctcaaaatagcaattaagtcttgtcgcctagagctaagtaccaaaaacagagaacgatggtgccatgaaatccagattatgaagaagttgaaccatgccaatgttgtaaaggcctgtgatgttcctgaagaattgaatattttgattcatgatgtgcctcttctagcaatggaatactgttctggaggagatctccgaaagctgctcaacaaaccagaaaattgttgtggacttaaagaaagccagatactttctttactaagtgatatagggtctgggattcgatatttgcatgaaaacaaaattatacatcgagatctaaaacctgaaaacatagttcttcaggatgttggtggaaagataatacataaaataattgatctgggatatgccaaagatgttgatcaaggaagtctgtgtacatcttttgtgggaacactgcagtatctggccccagagctctttgagaataagccttacacagccactgttgattattggagctttgggaccatggtatttgaatgtattgctggatataggccttttttgcatcatctgcagccatttacctggcatgagaagattaagaagaaggatccaaagtgtatatttgcatgtgaagagatgtcaggagaagttcggtttagtagccatttacctcaaccaaatagcctttgtagtttagtagtagaacccatggaaaactggctacagttgatgttgaattgggaccctcagcagagaggaggacctgttgaccttactttgaagcagccaagatgttttgtattaatggatcacattttgaatttgaagatagtacacatcctaaatatgacttctgcaaagataatttcttttctgttaccacctgatgaaagtcttcattcactacagtctcgtattgagcgtgaaactggaataaatactggttctcaagaacttctttcagagacaggaatttctctggatcctcggaaaccagcctctcaatgtgttctagatggagttagaggctgtgatagctatatggtttatttgtttgataaaagtaaaactgtatatgaagggccatttgcttccagaagtttatctgattgtgtaaattatattgtacaggacagcaaaatacagcttccaattatacagctgcgtaaagtgtgggctgaagcagtgcactatgtgtctggactaaaagaagactatagcaggctctttcagggacaaagggcagcaatgttaagtcttcttagatataatgctaacttaacaaaaatgaagaacactttgatctcagcatcacaacaactgaaagctaaattggagttttttcacaaaagcattcagcttgacttggagagatacagcgagcagatgacgtatgggatatcttcagaaaaaatgctaaaagcatggaaagaaatggaagaaaaggccatccactatgctgaggttggtgtcattggatacctggaggatcagattatgtctttgcatgctgaaatcatggagctacagaagagcccctatggaagacgtcagggagacttgatggaatctctggaacagcgtgccattgatctatataagcagttaaaacacagaccttcagatcactcctacagtgacagcacagagatggtgaaaatcattgtgcacactgtgcagagtcaggaccgtgtgctcaaggagctgtttggtcatttgagcaagttgttgggctgtaagcagaagattattgatctactccctaaggtggaagtggccctcagtaatatcaaagaagctgacaatactgtcatgttcatgcagggaaaaaggcagaaagaaatatggcatctccttaaaattgcctgtacacagagttctgcccggtcccttgtaggatccagtctagaaggtgcagtaacccctcagacatcagcatggctgcccccgacttcagcagaacatgatcattctctgtcatgtgtggtaactcctcaagatggggagacttcagcacaaatgatagaagaaaatttgaactgccttggccatttaagcactattattcatgaggcaaatgaggaacagggcaatagtatgatgaatcttgattggagttggttaacagaatgagttgtcacttgttcactgtccccaaacctatggaagttgttgctatacatgttggaaatgtgtttttcccccatgaaaccattcttcagacatcagtcaatggaagaaatggctatgaacagaaactacatttctactatgatcagaagaacatgattttacaagtataacagttttgagtaattcaagcctctaaacagacaggaatttagaaaaagtcaatgtacttgtttgaatatttgttttaataccacagctatttagaagcatcatcacgacacatttgccttcagtcttggtaaaacattacttatttaactgattaaaaataccttctatgtattagtgtcaacttttaacttttgggcgtaagaccaaatgtagttttgtatacagagaagaaaacctcaagtaataggcattttaagtaaaagtctacctgtgtttttttctaaaaaggctgctcacaagttctatttcttgaagaataaattctacctccttgtgttgcactgaacaggttctcttcctggcatcataaggagttggtgtaatcattttaaattccactgaaaatttaacagtatccccttctcatcgaagggattgtgtatctgtgcttctaatattagttggctttcataaatcatgttgttgtgtgtatatgtatttaagatgtacatttaataatatcaaagagaagatgcctgttaatttataatgtatttgaaaattacatgttttttcatttgtaaaaatgagtcatttgtttaaacaatctttcatgtcttgtcatacaaatttataaaggtctgcactcctttatctgtaattgtaattccaaaatccaaaaagctctgaaaacaaggtttccataagcttggtgacaaaattcatttgcttgcaatctaatctgaactgaccttgaatctttttatcccatttagtgtgaatattcctttattttgctgcttgatgatgagagggagggctgctgccacagactgtggtgagggctggttaatgtagtatggtatatgcacaaaactacttttctaaaatctaaaatttcataattctgaaacaacttgccccaagggtttcagagaaaggactgtggacctctatcatctgctaagtaatttagaagatattatttgtcttaaaaaatgtgaaatgcttttatattctaatagtttttcactttgtgtattaaatggtttttaaattaaaaaaaaaaaaaaaa

SEQ ID NO: 62 - DNA, 3445 bp, Homo sapiens
gagcaaccgcagcttctagtatccagactccagcgccgccccgggcgcggaccccaaccccgacccagagcttctccagcggcggcgcagcgagcagggctccccgccttaacttcctccgcggggcccagccaccttcgggagtccgggttgcccacctgcaaactctccgccttctgcacctgccacccctgagccagcgcgggcgcccgagcgagtcatggccaacgcggggctgcagctgttgggcttcattctcgccttcctgggatggatcggcgccatcgtcagcactgccctgccccagtggaggatttactcctatgccggcgacaacatcgtgaccgcccaggccatgtacgaggggctgtggatgtcctgcgtgtcgcagagcaccgggcagatccagtgcaaagtctttgactccttgctgaatctgagcagcacattgcaagcaacccgtgccttgatggtggttggcatcctcctgggagtgatagcaatctttgtggccaccgttggcatgaagtgtatgaagtgcttggaagacgatgaggtgcagaagatgaggatggctgtcattgggggtgcgatatttcttcttgcaggtctggctattttagttgccacagcatggtatggcaatagaatcgttcaagaattctatgaccctatgaccccagtcaatgccaggtacgaatttggtcaggctctcttcactggctgggctgctgcttctctctgccttctgggaggtgccctactttgctgttcctgtccccgaaaaacaacctcttacccaacaccaaggccctatccaaaacctgcaccttccagcgggaaagactacgtgtgacacagaggcaaaaggagaaaatcatgttgaaacaaaccgaaaatggacattgagatactatcattaacattaggaccttagaattttgggtattgtaatctgaagtatggtattacaaaacaaacaaacaaacaaaaaacccatgtgttaaaatactcagtgctaaacatggcttaatcttattttatcttctttcctcaatataggagggaagatttttccatttgtattactgcttcccattgagtaatcatactcaattgggggaaggggtgctccttaaatatatatagatatgtatatatacatgtttttctattaaaaatagacagtaaaatactattctcattatgttgatactagcatacttaaaatatctctaaaataggtaaatgtatttaattccatattgatgaagatgtttattggtatattttctttttcgtctatatatacatatgtaacagtcaaatatcatttactcttcttcattagctttgggtgcctttgccacaagacctagcctaatttaccaaggatgaattctttcaattcttcatgcgtgcccttttcatatacttattttattttttaccataatcttatagcacttgcatcgttattaagcccttatttgttttgtgtttcattggtctctatctcctgaatctaacacatttcatagcctacattttagtttctaaagccaagaagaatttattacaaatcagaactttggaggcaaatctttctgcatgaccaaagtgataaattcctgttgaccttcccacacaatccctgtactctgacccatagcactcttgtttgctttgaaaatatttgtccaattgagtagctgcatgctgttcccccaggtgttgtaacacaactttattgattgaatttttaagctacttattcatagttttatatccccctaaactacctttttgttccccattccttaattgtattgttttcccaagtgtaattatcatgcgttttatatcttcctaataaggtgtggtctgtttgtctgaacaaagtgctagactttctggagtgataatctggtgacaaatattctctctgtagctgtaagcaagtcacttaatctttctacctcttttttctatctgccaaattgagataatgatacttaaccagttagaagaggtagtgtgaatattaattagtttatattactctcattctttgaacatgaactatgcctatgtagtgtctttatttgctcagctggctgagacactgaagaagtcactgaacaaaacctacacacgtaccttcatgtgattcactgccttcctctctctaccagtctatttccactgaacaaaacctacacacataccttcatgtggttcagtgccttcctctctctaccagtctatttccactgaacaaaacctacgcacataccttcatgtggctcagtgccttcctctctctaccagtctatttccattctttcagctgtgtctgacatgtttgtgctctgttccattttaacaactgctcttacttttccagtctgtacagaatgctatttcacttgagcaagatgatgtaatggaaagggtgttggcattggtgtctggagacctggatttgagtcttggtgctatcaatcaccgtctgtgtttgagcaaggcatttggctgctgtaagcttattgcttcatctgtaagcggtggtttgtaattcctgatcttcccacctcacagtgatgttgtggggatccagtgagatagaatacatgtaagtgtggttttgtaatttaaaaagtgctatactaagggaaagaattgaggaattaactgcatacgttttggtgttgcttttcaaatgtttgaaaacaaaaaaaatgttaagaaatgggtttcttgccttaaccagtctctcaagtgatgagacagtgaagtaaaattgagtgcactaaacaaataagattctgaggaagtcttatcttctgcagtgagtatggcccgatgctttctgtggctaaacagatgtaatgggaagaaataaaagcctacgtgttggtaaatccaacagcaagggagatttttgaatcataataactcataaggtgctatctgttcagtgatgccctcagagctcttgctgttagctggcagctgacgctgctaggatagttagtttggaaatggtacttcataataaactacacaaggaaagtcagccactgtgtcttatgaggaattggacctaataaattttagtgtgccttccaaacctgagaatatatgcttttggaagttaaaatttaaatggcttttgccacatacatagatcttcatgatgtgtgagtgtaattccatgtggatatcagttaccaaacattacaaaaaaattttatggcccaaaatgaccaacgaaattgttacaatagaatttatccaattttgatctttttatattcttctaccacacctggaaacagaccaatagacattttggggttttataataggaatttgtataaagcattactctttttcaataaattgttttttaatttaaaaaaaggaaaaaaaaaaaaaaaaa

SEQ ID NO: 63 - DNA, 6549 bp, Homo sapiens
gcttggagccgccgcacccgggacggtgcgtagcgctggaagtccggccttccgagagctagctgtccgccgcggcccccgcacgccgggcagccgtccctcgccgcctcgggcgcgccaccatggggccccggctcagcgtctggctgctgctgctgcccgccgcccttctgctccacgaggagcacagccgggccgctgcgaagggtggctgtgctggctctggctgtggcaaatgtgactgccatggagtgaagggacaaaagggtgaaagaggcctcccggggttacaaggtgtcattgggtttcctggaatgcaaggacctgaggggccacagggaccaccaggacaaaagggtgatactggagaaccaggactacctggaacaaaagggacaagaggacctccgggagcatctggctaccctggaaacccaggacttcccggaattcctggccaagacggcccgccaggccccccaggtattccaggatgcaatggcacaaagggggagagagggccgctcgggcctcctggcttgcctggtttcgctggaaatcccggaccaccaggcttaccagggatgaagggtgatccaggtgagatacttggccatgtgcccgggatgctgttgaaaggtgaaagaggatttcccggaatcccagggactccaggcccaccaggactgccagggcttcaaggtcctgttgggcctccaggatttaccggaccaccaggtcccccaggccctcccggccctccaggtgaaaagggacaaatgggcttaagttttcaaggaccaaaaggtgacaagggtgaccaaggggtcagtgggcctccaggagtaccaggacaagctcaagttcaagaaaaaggagacttcgccaccaagggagaaaagggccaaaaaggtgaacctggatttcaggggatgccaggggtcggagagaaaggtgaacccggaaaaccaggacccagaggcaaacccggaaaagatggtgacaaaggggaaaaagggagtcccggttttcctggtgaacccgggtacccaggactcataggccgccagggcccgcagggagaaaagggtgaagcaggtcctcctggcccacctggaattgttataggcacaggacctttgggagaaaaaggagagaggggctaccctggaactccggggccaagaggagagccaggcccaaaaggtttcccaggactaccaggccaacccggacctccaggcctccctgtacctgggcaggctggtgcccctggcttccctggtgaaagaggagaaaaaggtgaccgaggatttcctggtacatctctgccaggaccaagtggaagagatgggctcccgggtcctcctggttcccctgggccccctgggcagcctggctacacaaatggaattgtggaatgtcagcccggacctccaggtgaccagggtcctcctggaattccagggcagccaggatttataggcgaaattggagagaaaggtcaaaaaggagagagttgcctcatctgtgatatagacggatatcgggggcctcccgggccacagggacccccgggagaaataggtttcccagggcagccaggggccaagggcgacagaggtttgcctggcagagatggtgttgcaggagtgccaggccctcaaggtacaccagggctgataggccagccaggagccaagggggagcctggtgagttttatttcgacttgcggctcaaaggtgacaaaggagacccaggctttccaggacagcccggcatgacagggagagcgggttctcctggaagagatggccatccgggtcttcctggccccaagggctcgccgggttctgtaggattgaaaggagagcgtggcccccctggaggagttggattcccaggcagtcgtggtgacaccggcccccctgggcctccaggatatggtcctgctggtcccattggtgacaaaggacaagcaggctttcctggaggccctggatccccaggcctgccaggtccaaagggtgaaccaggaaaaattgttcctttaccaggcccccctggagcagaaggactgccggggtccccaggcttcccaggtccccaaggagaccgaggctttcccggaaccccaggaaggccaggcctgccaggagagaagggcgctgtgggccagccaggcattggatttccagggccccccggccccaaaggtgttgacggcttacctggagacatggggccaccggggactccaggtcgcccgggatttaatggcttacctgggaacccaggtgtgcagggccagaagggagagcctggagttggtctaccgggactcaaaggtttgccaggtcttcccggcattcctggcacacccggggagaaggggagcattggggtaccaggcgttcctggagaacatggagcgatcggaccccctgggcttcaggggatcagaggtgaaccgggacctcctggattgccaggctccgtggggtctccaggagttccaggaataggcccccctggagctaggggtccccctggaggacagggaccaccggggttgtcaggccctcctggaataaaaggagagaagggtttccccggattccctggactggacatgccgggccctaaaggagataaaggggctcaaggactccctggcataacgggacagtcggggctccctggccttcctggacagcagggggctcctgggattcctgggtttccaggttccaagggagaaatgggcgtcatggggacccccgggcagccgggctcaccaggaccagtgggtgctcctggattaccgggtgaaaaaggggaccatggctttccgggctcctcaggacccaggggagaccctggcttgaaaggtgataagggggatgtcggtctccctggcaagcctggctccatggataaggtggacatgggcagcatgaagggccagaaaggagaccaaggagagaaaggacaaattggaccaattggtgagaagggatcccgaggagaccctgggaccccaggagtgcctggaaaggacgggcaggcaggacagcctgggcagccaggacctaaaggtgatccaggtataagtggaaccccaggtgctccaggacttccgggaccaaaaggatctgttggtggaatgggcttgccaggaacacctggagagaaaggtgtgcctggcatccctggcccacaaggttcacctggcttacctggagacaaaggtgcaaaaggagagaaagggcaggcaggcccacctggcataggcatcccagggctgcgaggtgaaaagggagatcaagggatagcgggtttcccaggaagccctggagagaagggagaaaaaggaagcattgggatcccaggaatgccagggtccccaggccttaaagggtctcccgggagtgttggctatccaggaagtcctgggctacctggagaaaaaggtgacaaaggcctcccaggattggatggcatccctggtgtcaaaggagaagcaggtcttcctgggactcctggccccacaggcccagctggccagaaaggggagccaggcagtgatggaatcccggggtcagcaggagagaagggtgaaccaggtctaccaggaagaggattcccagggtttccaggggccaaaggagacaaaggttcaaagggtgaggtgggtttcccaggattagccgggagcccaggaattcctggatccaaaggagagcaaggattcatgggtcctccggggccccagggacagccggggttaccgggatccccaggccatgccacggaggggcccaaaggagaccgcggacctcagggccagcctggcctgccaggacttccgggacccatggggcctccagggcttcctgggattgatggagttaaaggtgacaaaggaaatccaggctggccaggagcacccggtgtcccagggcccaagggagaccctggattccagggcatgcctggtattggtggctctccaggaatcacaggctctaagggtgatatggggcctccaggagttccaggatttcaaggtccaaaaggtcttcctggcctccagggaattaaaggtgatcaaggcgatcaaggcgtcccgggagctaaaggtctcccgggtcctcctggccccccaggtccttacgacatcatcaaaggggagcccgggctccctggtcctgagggccccccagggctgaaagggcttcagggactgccaggcccgaaaggccagcaaggtgttacaggattggtgggtatacctggacctccaggtattcctgggtttgacggtgcccctggccagaaaggagagatgggacctgccgggcctactggtccaagaggatttccaggtccaccaggccccgatgggttgccaggatccatggggcccccaggcaccccatctgttgatcacggcttccttgtgaccaggcatagtcaaacaatagatgacccacagtgtccttctgggaccaaaattctttaccacgggtactctttgctctacgtgcaaggcaatgaacgggcccatggccaggacttgggcacggccggcagctgcctgcgcaagttcagcacaatgcccttcctgttctgcaatattaacaacgtgtgcaactttgcatcacgaaatgactactcgtactggctgtccacccctgagcccatgcccatgtcaatggcacccatcacgggggaaaacataagaccatttattagtaggtgtgctgtgtgtgaggcgcctgccatggtgatggccgtgcacagccagaccattcagatcccaccgtgccccagcgggtggtcctcgctgtggatcggctactcttttgtgatgcacaccagcgctggtgcagaaggctctggccaagccctggcgtcccccggctcctgcctggaggagtttagaagtgcgccattcatcgagtgtcacggccgtgggacctgcaattactacgcaaacgcttacagcttttggctcgccaccatagagaggagcgagatgttcaagaagcctacgccgtccaccttgaaggcaggggagctgcgcacgcacgtcagccgctgccaagtctgtatgagaagaacataatgaagcctgactcagctaatgtcacaacatggtgctacttcttcttctttttgttaacagcaacgaaccctagaaatatatcctgtgtacctcactgtccaatatgaaaaccgtaaagtgccttataggaatttgcgtaactaacacaccctgcttcattgacctctacttgctgaaggagaaaaagacagcgataagctttcaatagtggcataccaaatggcacttttgatgaaataaaatatcaatattttctgcaatccaatgcactgatgtgtgaagtgagaactccatcagaaaaccaaagggtgctaggaggtgtgggtgccttccatactgtttgcccattttcattcttgtattataattaattttctacccccagagataaatgtttgtttatatcactgtctagctgtttcaaaatttaggtcccttggtctgtacaaataatagcaatgtaaaaatggttttttgaacctccaaatggaattacagactcagtagccatatcttccaaccccccagtataaatttctgtctttctgctatgtgtggtactttgcagctgcttttgcagaaatcacaattttcctgtggaataaagatggtccaaaaatagtcaaaaattaaatatatatatatattagtaatttatatagatgtcagcaattaggcagatcaaggtttagtttaacttccactgttaaaataaagcttacatagttttcttcctttgaaagactgtgctgtcctttaacataggtttttaaagactaggatattgaatgtgaaacatccgttttcattgttcacttctaaaccaaaaattatgtgttgccaaaaccaaacccaggttcatgaatatggtgtctattatagtgaaacatgtactttgagcttattgtttttattctgtattaaatattttcagggttttaaacactaatcacaaactgaatgacttgacttcaaaagcaacaaccttaaaggccgtcatttcattagtattcctcattctgcatcctggcttgaaaaacagctctgttgaatcacagtatcagtattttcacacgtaagcacattcgggccatttccgtggtttctcatgagctgtgttcacagacctcagcagggcatcgcatggaccgcaggagggcagattcggaccactaggcctgaaatgacatttcactaaaagtctccaaaacatttctaagactactaaggccttttatgtaatttctttaaatgtgtatttcttaagaattcaaatttgtaataaaactatttgtataaaaattaagcttttattaatttgttgctagtattgccacagacgcattaaaagaaacttactgcacaagctgctaataaatttgtaagctttgcataccttaaaaaaaaaaaaaaaaaa

SEQ ID NO: 64 - DNA, 6264 bp, Homo sapiens
gagtgtggctgcagtgcgccgggacaccagggctccgcgctccgcactcaagaggctcccgcgtcccaacccctcgcgcccgcgcgttcgcggatccaggccgaggaccgaaaggggccgcccgagcccccggggccggcgcccagagagcccagcaaggccggccgccctgccggtgtgccgccggcgggtgcttctggaagggccaatgcgttcgggcagcagcccctgaagccgagcccgaggctaagtgggactgaccggggcccagagtggacgaaccgccagcatggggagagaccagcgcgcggtggccggccctgccctacggcggtggctgctgctggggacagtgaccgtggggttcctcgcccagagcgtcttggcgggtgtgaagaagtttgatgtgccgtgtggaggaagagattgcagtgggggctgccagtgctaccctgagaaaggtggacgtggtcagcctgggccagtgggcccccaggggtacaatgggccaccaggattacaaggattcccgggactgcagggacgtaaaggagacaagggtgaaaggggagcccccggagtaacgggacccaagggcgacgtgggagcaagaggcgtttctggattccctggtgccgatggaattcctggacacccggggcaaggtgggcccaggggaaggccgggctacgatggctgcaacggaacccagggagactcaggtccacaggggccccccggctctgaggggttcaccgggcctcccgggccccaaggaccaaaagggcagaaaggtgagccttatgcactgcctaaagaggagcgcgacagatatcggggtgaacctggagagcctggattggtcggtttccagggacctcccggccgccctgggcatgtgggacagatgggtccagttggagctccagggagaccaggaccacctggaccccctggaccaaaaggacagcaaggcaacagaggacttggtttctacggagttaagggtgaaaagggtgacgtagggcagccgggacccaacgggattccatcagacaccctccaccccatcatcgcgcccacaggagtcaccttccacccagatcagtacaagggtgaaaaaggcagtgagggggaaccaggaataagaggcatttccttgaagggagaagaaggaatcatgggctttcctggactgaggggttaccctggcttgagtggtgaaaaaggatcaccaggacagaagggaagccgaggcctggatggctatcaagggcctgatggaccccggggacccaagggagaagccggagacccagggccccctggactacctgcctactcccctcacccttccctagcaaaaggtgccagaggtgacccgggattcccaggggcccaaggggagccaggaagccagggtgagccaggagacccgggcctcccaggtccccctggcctctccatcggagatggagatcagaggagaggcctgccgggtgagatgggacccaagggcttcatcggagaccccggcatccctgcgctctacgggggcccacctggacctgatggaaagcgagggcctccaggaccccccgggctccctggaccacctggacctgatggcttcctgtttgggctgaaaggagcaaaaggaagagcaggcttccctgggcttcccggctcccctggagcccgcggaccaaaggggtggaaaggtgacgctggggaatgcagatgtacagaaggcgacgaagctatcaaaggtcttccgggactgccaggacccaagggcttcgcaggcatcaacggggagccggggaggaaaggggacagaggagaccccggccaacacggcctccctgggttcccagggctcaagggagtgcctggcaacattggtgctcccggacccaaaggagcaaaaggagattccagaacaatcacaaccaaaggtgagcggggacagcccggcgtcccaggtgtgcccgggatgaaaggtgacgatggcagcccaggccgcgatgggctcgatggattccccggcctcccaggccctcccggtgatggcatcaagggccctccaggggacccaggctatccaggaatacctggaacgaagggtactccaggagaaatgggccccccaggactgggccttcccggcctcaaaggccaacgtggtttccctggagacgccggcttacctggaccaccaggcttcctgggccctcctggccccgcagggaccccaggacaaatagattgtgacacagatgtgaaaagggccgttggaggtgacagacaggaggccatccagccaggttgcataggagggcccaagggattgccaggcctgccaggacccccaggccccacaggtgccaaaggcctccgaggaatcccaggcttcgcaggagctgatggaggaccagggcccaggggcttgccaggagacgcaggtcgtgaagggttcccaggacccccagggttcataggaccccgaggatccaaaggtgcagtgggcctccctggcccagatggatccccaggtcccatcggcctgccagggccagatgggccccctggggaaaggggcctccctggagaagtcctgggagctcagcccgggccacggggagatgctggtgtgcctggacagcctgggcttaaaggccttcccggagacagaggcccccctggattcagaggaagccaagggatgcctgggatgccagggctgaagggccagccaggcctcccaggaccttccggccagccaggcctgtatgggcctccaggactgcatggattcccaggagctcctggccaagaggggcccttggggctgccaggaatcccaggccgtgaaggtctgcctggtgatagaggggaccctggggacacaggcgctcctggccctgtgggcatgaaaggtctctctggtgacagaggagatgctggcttcacaggggagcaaggccatccaggaagccctggatttaaaggaattgatggaatgcctgggacccccgggctaaaaggagatagaggctcacctgggatggatggtttccaaggcatgcctggactcaaagggagacccgggtttccagggagcaaaggcgaggctggatttttcggaatacccggtctgaagggtctggctggtgagccaggttttaaaggcagccgaggggaccctgggcccccaggaccacctcctgtcatcctgccaggaatgaaagacattaaaggagagaaaggagatgaagggcctatggggctgaaaggatacctgggcgcaaaaggtatccaaggaatgccaggcatcccagggctgtcaggaatccctgggctgcctgggaggcccggccacatcaaaggagtcaagggagacatcggagtccccggcatccccggtttgccaggattccctggggtggctggcccccctggaattacgggattcccaggattcataggaagccggggtgacaaaggtgccccagggagagcaggcctgtatggcgagattggcgcgactggtgatttcggtgacatcggggacactataaatttaccaggaagaccaggcctgaagggggagcggggcaccactggaataccaggtctgaagggattctttggagagaagggaacagaaggtgacatcggcttccctgggataacaggcgtgactggagtccaaggccctcctggacttaaaggacaaacaggctttccagggctgactgggcctccagggtcgcagggagagctggggcggattggactgcctggtggcaaaggagatgatggctggccgggagctccgggcttaccaggttttccgggactccgtgggatccgcggcttacacggcttgccaggcaccaagggctttccaggatccccaggttctgacatccacggagacccaggcttcccaggccctcctggggaaagaggtgacccaggagaggccaacacccttccaggccctgtgggagtcccaggacagaaaggagaccaaggagctccaggggaacgaggcccacctgggagcccaggacttcaggggttcccaggcatcacacccccttccaacatctctggggcacctggtgacaaaggggcgccagggatatttggcctgaaaggttatcggggcccaccagggccaccaggttctgctgctcttcctggaagcaaaggtgacacagggaacccaggagctccaggaaccccagggaccaaaggatgggccggggactccgggccccagggcaggcctggtgtgtttggtctcccaggagaaaaagggcccaggggtgaacaaggcttcatggggaacactggacccaccggggcggtgggcgacagaggccccaagggacccaagggagacccaggattccctggtgcccccgggactgtgggagcccccgggattgcaggaatcccccagaagattgccgtccaaccagggacagtgggtccccaggggaggcgaggcccccctggggcaccgggggagatggggccccagggcccccccggagaaccaggttttcgtggggctccagggaaagctgggccccaaggaagaggtggtgtgtctgctgttcccggcttccggggagatgaaggacccataggccaccaggggccgattggccaagaaggtgcaccaggccgtccagggagcccgggcctgccgggtatgccaggccgcagcgtcagcatcggctacctcctggtgaagcacagccagacggaccaggagcccatgtgcccagtgggcatgaacaaactctggagtggatacagcctgctgtacttcgagggccaggagaaggcgcacaaccaggacctggggctggcgggctcctgcctggcgcggttcagcaccatgcccttcctgtactgcaaccctggtgatgtctgctactatgccagccggaacgacaagtcctactggctctctaccactgcgccgctgcccatgatgcccgtggccgaggacgagatcaagccctacatcagccgctgttctgtgtgtgaggccccggccatcgccatcgcggtccacagtcaggatgtctccatcccacactgcccagctgggtggcggagtttgtggatcggatattccttcctcatgcacacggcggcgggagacgaaggcggtggccaatcactggtgtcaccgggcagctgtctagaggacttccgcgccacaccattcatcgaatgcaatggaggccgcggcacctgccactactacgccaacaagtacagcttctggctgaccaccattcccgagcagagcttccagggctcgccctccgccgacacgctcaaggccggcctcatccgcacacacatcagccgctgccaggtgtgcatgaagaacctgtgagccggcgcgtgccaggaagggccattttggtgcttattcttaacttattacctcaggtgccaacccaaaaattggttttatttttttcttaaaaaaaaaaaagtctaccaaaggaatttgcatccagcagcagcacttagacctgccagccactgtcaccgagcgggtgcaagcactcggggtccctggagggcaagccctgcccacagaaagccaggagcagccctggcccccatcagccctgctagacgcaccgcctgaaggcacagctaaccacttcgcacacacccatgtaaccactgcactttccaatgccacagacaactcacattgttcaactcccttctcggggtgggacagacgagacaacagcacacaggcagccagccgtggccagaggctcgaggggctcagggcctcaggcacccgtccccacacgagggccccgtgggtgggcctggccctgctttctacgccaatgttatgccagctccatgttctcccaaataccgttgatgtgaattattttaaaggcaaaaccgtgctctttattttaaaaaacactgataatcacactgcggtaggtcattcttttgccacatccctatagaccactgggtttggcaaaactcaggcagaagtggagacctttctagacatcattgtcagccttgctacttgaaggtacaccccatagggtcggaggtgctgtccccactgccccacgttgtccctgagatttaacccctccactgctgggggtgagctgtactcttctgactgccccctcctgtgtaacgactacaaaataaaacttggttctgaatatttttaaa

SEQ ID NO: 65 - DNA, 7923 bp, Homo sapiens
gggagggacgaaccgcgcgaccgagccctacaaaacccgccccggccgagtggcgaggcgagctttccagccgggctcccagagccgcgctgcgcaggagacgcggtggcctgagagcctgagggtccccggactcgcccaggctctgagcgcgcgcccaccatgagcgcccggaccgcccccaggccgcaggtgctcctgctgccgctcctgctggtgctcctggcggcggcgcccgcagccagcaagggttgtgtctgtaaagacaaaggccagtgcttctgtgacggggccaaaggggagaagggggagaagggctttcctggaccccccggttctcctggccagaaaggattcacaggtcctgaaggcttgcctggaccgcagggacccaagggctttccaggacttccaggactcacgggttccaaaggtgtaaggggaataagtggattgccaggattttctggttctcctggacttccaggcaccccaggcaataccgggccttacggacttgtcggtgtaccaggatgcagtggttctaagggtgagcaggggtttccaggactcccagggacactgggctacccagggatcccgggtgctgctggtttgaaaggacaaaagggtgctcctgctaaagaagaagatatagaacttgatgcaaaaggcgaccccgggttgccaggggctccaggaccccagggtttgccaggccctccaggttttcctgggcctgttggcccacctggtcctccgggattctttggctttccaggagccatgggacctagaggacctaagggtcacatgggtgaaagagtgataggacataaaggagagcggggtgtgaaagggttaacaggacccccgggaccaccaggaacagttattgtgaccctaactggcccagataacagaacggacctcaagggggaaaagggagacaagggagcaatgggcgagcctggacctcctggaccctcaggactgcctggagaatcatatggatctgaaaagggtgctcctggagaccctggcctgcagggaaaacccggaaaagatggtgttcctggcttccctggaagtgagggagtcaagggcaacaggggtttccctgggttaatgggtgaagatggcattaagggacagaaaggggacattggccctccaggatttcgtggtccaacagaatattatgacacataccaggaaaagggagatgaaggcactccaggcccaccagggcccagaggagctcgtggcccacaaggtcccagtggtccccccggagttcctggaagtcctggatcatcaaggcctggcctcagaggagcccctggatggccaggcctgaaaggaagtaaaggggaacgaggccgcccaggaaaggatgccatggggactcctgggtccccaggttgtgctggttcaccaggtcttccaggatcaccgggacctccaggaccgccaggtgacatcgtttttcgcaagggtccacctggagatcacggactgccaggctatctagggtctccaggaatcccaggagttgatgggcccaaaggagaaccaggcctcctgtgtacacagtgcccttatatcccagggcctcccggtctcccaggattgccagggttacatggtgtaaaaggaatcccaggaagacaaggcgcagctggcttgaaaggaagcccagggtccccaggaaatacaggtcttccaggatttccaggtttcccaggtgcccagggtgacccaggacttaaaggagaaaaaggtgaaacacttcagcctgaggggcaagtgggtgtcccaggtgacccggggctcagaggccaacctgggagaaagggcttggatggaattcctggaactccgggagtgaaaggattaccaggacctaaaggcgaactggctctgagtggtgagaaaggggaccaaggtcctccaggggatcctggctcccctgggtccccaggacctgcaggaccagctggaccacctggctacggaccccaaggagaacctggtctccagggcacgcaaggagttcctggagcccccggaccacccggagaagccggccctaggggagagctcagtgtttcaacaccagttccaggcccaccaggacctccagggccccctggccatcctggcccccaaggtccacctggtatccctggatccctggggaaatgtggagatcctggtcttccagggcctgatggtgaaccaggaattccaggaattggatttcctgggcctcctggacctaagggagaccaaggttttccaggtacaaaaggatcactgggttgtcctggaaaaatgggagagcctgggttacctggaaagccaggcctcccaggagccaagggagaaccagcagtagccatgcctggaggaccaggaacaccaggttttccaggagaaagaggcaattctggggaacatggagaaattggactccctggacttccaggtctccctggaactccaggaaatgaagggcttgatggaccacgaggagatccagggcagcctggaccacctggagaacaaggacccccaggaaggtgcatagagggtcccaggggagcccaaggacttccaggcttaaatggattgaaagggcaacaaggcagaagaggtaaaacggggccaaagggagacccaggaattccaggcttggatagatcaggatttcctggagaaactggatcaccaggaattccaggtcatcaaggtgaaatgggaccactgggtcaaagaggatatccaggaaatccgggaattttagggccaccaggtgaagatggagtgattgggatgatgggctttcctggagccattggccctccagggccccctgggaacccaggcacaccagggcagagggggagccctggaattccaggagtaaagggccagagaggaaccccaggagccaagggggaacaaggagataaaggaaatcccgggccttcagagatatcccacgtaataggggacaaaggagaaccaggtctcaaaggattcgcaggaaatccaggtgagaaaggaaacagaggcgttccagggatgccaggtttaaagggcctcaaaggactacccggaccagcaggaccaccaggccccagaggagatttgggcagcactgggaatcctggagaaccaggactgcgtggtataccaggaagcatggggaacatgggcatgccaggttctaaaggaaaaaggggaactttgggattcccaggtcgagcaggaagaccaggcctcccaggtattcatggtctccagggagataagggagagccaggttattcagaaggtacaaggccaggaccaccgggaccaacgggggatccaggactgccgggtgatatgggaaagaaaggagaaatggggcaacctggcccacctggacatttggggcctgctggacctgagggagcccctggaagtcctggaagtcctggcctcccaggaaagccaggtcctcatggtgatttgggttttaaaggaatcaaaggcctcctgggccctccaggaatcagaggccctccaggtcttccaggatttccaggatctcctggaccaatgggtataagaggtgaccaaggacgtgatggaattcctggtccagccggagaaaagggagaaacgggtttattgagggcccctccaggcccaagagggaaccctggtgctcaaggagccaaaggagacaggggagccccaggttttcctggcctcccgggcagaaaaggggccatgggagatgctggacctcgaggacccacaggcatagaaggattcccagggccaccaggtctgcccggtgcaattatccctggccagacaggaaatcgtggtccaccaggctcaagaggaagcccaggtgcgcctggtccccctggacctccagggagtcatgtaataggcataaaaggagacaaagggtctatgggccaccctggcccaaaaggtccacctggaactgcaggagacatgggaccaccaggtcgtctgggagcaccaggtactccaggtcttccaggacccagaggtgatcctggattccaggggtttccaggcgtgaaaggagaaaagggtaatcctggatttctaggatccattggacctccaggaccaattgggccaaaaggaccacctggtgtacgtggagaccctggcacacttaagattatctcccttccaggaagcccagggccacctggcacacctggagaaccagggatgcagggagaacctgggccaccagggccacctggaaacctaggaccctgtgggccaagaggtaagccaggcaaggatggaaaaccaggaactcctggaccagctggagaaaaaggcaacaaaggttctaaaggagagccaggaccagctggatcagatggattgccaggtttgaaaggaaaacgtggagacagtggatcacctgcaacctggacaacgagaggctttgtcttcacccgacacagtcaaaccacagcaattccttcatgtccagaggggacagtgccactctacagtgggttttcttttctttttgtacaaggaaatcaacgagcccacggacaagaccttggaactcttggcagctgcctgcagcgatttaccacaatgccattcttattctgcaatgtcaatgatgtatgtaattttgcatctcgaaatgattattcatactggctgtcaacaccagctctgatgccaatgaacatggctcccattactggcagagcccttgagccttatataagcagatgcactgtttgtgaaggtcctgcgatcgccatagccgttcacagccaaaccactgacattcctccatgtcctcacggctggatttctctctggaaaggattttcattcatcatgaaagcctattccatcaactgtgaaagctggggaattagaaaaaataataagtcgctgtcaggtgtgcatgaagaaaagacactgaagctaaaaaagacagcagaactgctatttttcatcctaaagaacaaagtaatgacagaacatgctgttatttaggtatttttctttaaccaaacaatattgctccatgatgacttagtacaaagtttcaatttgtttccccacaaaacaaagcaattctttcaagtcagttctgtgatctgggtctctaatctgtgctgtttcaaagttctctgtggcaaagcagcaactattcacaaaatatcaccaaaaacctattccacttacatccaaggcactgtcactacggtgattgtatgaagtttgaatgctgcaagttatgaaatatttggcccgctggattcccacatttgtcttctttctgtctttaagactcagggaggctaaatcagtgtttgattgccccgccaacccttcctgaaacttcagaccctgggtaggggaagagaagggggcatgtggtatcctggagcattgtgtatagaactggattttcagacctgctgaggaccgtaaggcctgatggaacacagaactgaactgaggttcatggattttccaggactgtttcaaacatgcccattactaacggcaaaagggggattccctgatggaaccataatacccttggaaatactgtatggttttgttttgttttgttggtttttaaagatttttgtttgtttattgaattcatttcactgtagctctaaaatctgcttgtattccaagcatataaaattttcccccttagtgaattagttttaaaatgatattgttatatacatactatgaaatatgtataactttaacttctgttttaccagcatacccacacaaataacaagaatactacttatgaaatgtgcactttatcctcattccataaatgtcggtgcataccttatgtaagggagcagttcaataatccatgaaagaacttaaggcatttgttggtttatcagactcggaatctattttctcattgctctgaatatgtcatcactctaggttttacagatttattcctttgttacttctctaattcttcctttgtaaaaaaaaaaaaaagcaacactttttatgttatatgttgttcttacaaaccatactgaaagagtccattgtttaaaaatcttaatgtatcaaactgtataacttggccgctgtatgtcttaaaacctgcttttcaatgtgttgatacattcccaaggttacttaattcaacttaactatcatcttattcagcaccaagcatgtcccaggcactgtactaacctacagagatgctaagagaaaaaaaagacttgtttctgatctaatatcccagaaaaagtaactcattgctctgttaataatctcacatatacaagtagcttccctcccctctagttttttcttccttttcactgctgttatatttcatcatgataattcagcaggcccaagtaaaggttaaaaataaggtctatgcctagggaaactcagggcttctagtttctcttagaaaagctaagagaagataaggtctgaataatagcagaaaaaccaacatctacaaaacattaaactagtgttatacttgatgataacactatttgatgagtcttagagtccagacacaaagagacaaagctttgaagatgctttttgatctacctaggtggagttggtggtgctgatatttaaattcaggctactgcttcaatctcaattgctttgtaagtgaaaaacatgacccagaggacagcacagactatggccatggctcacatggtttacatccttcactgctcacgtgtttgctgtcaagccatttttacatctaaactaagatgtgcagcatttcacttatttagattcacttaacaaacaaatttttctgctttaaaaatgtcttattgtcccaagtgtactatagcggcatatagagctagctaatctctacaaaccctctgtaggccagtagttctcaaagtgtggtctctggaagagcagtatcagcatcatctgggaacttgtcacagatgcagattctagggaccactccagacctacacaatcagaaactcttgggggagggcccgaaatatctatgttttaccaagcccaccacatgattctgatgtactctaaatactgagaaaacctgttctagacaaatacccaagcaacaactccgcaggcagttaccaagtacggctggctacaactgctccatccgtgcctctttttaaagttcaaactcacaggtgactctaaggttatctacttttactcataagtaaaagccctagactggtgctaatgtcaaaccactggcctccactcaggcctccatcttctcatgccctcttaccagtatttaacttctgaggaagacaagtgatgctaaaacctgaaattccaatgaagccatatgaacagctgttcagttgcacttctaagactttacttagcagtaaattatagctcatgtgcattattttccagataacttagcttatgagtagcttatacaattatgaagatttaatattacagataaaatgtaaactgtttctttaaaattggggcttcaactttggaatttcacagcgtgctaaaataacagatttctcagaagtctttcagcaagataaacattattaagtaacttatttatgaaagtattaaaatgcttacatttgaacttgatggctaacttacaaagattctctatgtatcaaatgtaacttactgcgactaaacttaatttaatatttactctataaccaaatgaaatatatttaaaatatattgaatattttatattgttatatcctgacaagattataatattttaatgtactaatatttctgtaattatatctaaaatattattttattatattgcctaagaataaacatttgttaaattgg

SEQ ID NO: 66 - DNA, 10341 bp, Homo sapiens
aggctttttggttgtggcttcaagggagggaagacgtggctcaggtcccgccctcataccccctccctcccaacttaccaggcagtgtcccttctacccgggcatcgtgcccaggaggcgagaaagggctgggcgcctgaggggcaggtgggcgcggatccagggtaaggggttaaggaggtgatgctcccaaggtccgggggcccaggcggggaagtggggtgcggtcggaggtggggcgtttgggggtgtgcggtggggaggtggctgcgcggtggggaggtggctgcgcagggtggagggagtggccagcggccctgcccagattaagcgggaggcgcgccgggcgtctgcactcgggaggccccgcttgttccccgcgcccgcggcggtccgcgttccccgcctccagcccgcctccaacttgcggccgccgggcttggctgcgagagcgccgcgaagaggcagcggggcgcgggtggattggggctggaggtgcgcgtcccgtggggtggcaaggcggcagctcctggcgctgcgggcgtccccacaggaacagactttgacccagaacacagaacctcacttgtcaacaagaaccttctggaagagaagactggcagaatattttttaagtactaagacttgcctgcgatgtggtctctgcacatagtactaatgaggtgctccttcagattgaccaagtccttggccacaggtccctggtcacttatactcattctcttttctgtacaatatgtatatgggagtggaaagaaatacattggtccttgtggaggaagagattgctctgtttgccactgtgttcctgaaaaggggtctcggggtccaccaggaccaccagggccacagggtccaattggacccctgggagccccaggacccattgggctttcaggagagaaaggaatgagaggggaccgcggccctcctggagcagcaggggacaaaggagataagggtccaactggtgttcctggatttccaggtttagatggcatacctgggcacccagggcctcctggacccagaggcaaacctggtatgagtggccacaatggctcaagaggtgacccagggtttccaggaggaagaggagctcttggcccaggaggccccctaggccatcctggggaaaagggagaaaaaggaaattcagtgttcattttaggtgccgttaaaggtattcagggagacagaggggacccaggactgcctggcttaccaggatcttggggtgcaggaggaccggcaggtcccacaggatatcctggagagccagggttagtgggacctccgggccaaccagggcgtccaggtttgaagggaaatcccggtgtgggagtaaaggggcaaatgggagacccgggtgaggttggtcagcaaggttctcctggacccaccctgttggtagagccacctgacttttgtctctataaaggagaaaagggtataaaaggaattcctggaatggttggactgccaggaccaccaggacgcaagggagaatctggtattggggcaaaaggagaaaaaggtattcctggatttccagggcctcggggggatcctggttcctatggatctccaggttttccaggattaaagggagaactaggactggttggagatcctgggctatttggattaattggcccaaagggggatcctggaaatcgagggcacccaggaccaccaggtgttttggtgactccacctcttccactcaaaggcccaccaggggacccagggttccctggccgctatggagaaacaggggatgttggaccacctggtcccccaggtctcttgggcagaccaggggaagcctgtgcaggcatgataggaccccctgggccacaaggatttcctggtcttcctgggcttccaggagaagctggtattcctgggagacctgattctgctccaggaaaaccagggaagccaggatcacctggcttgcctggagcaccaggcctgcagggcctcccaggatcaagtgtgatatactgtagtgttgggaaccccggaccacaaggaataaaaggcaaagttggtcccccaggaggaagaggcccaaaaggagaaaaaggaaatgaaggactctgtgcctgtgagcctggacccatgggcccccctggccctccaggacttcctgggaggcaggggagtaagggagacttggggctccctggctggcttggaacaaaaggtgacccaggacctcctggtgctgaaggacctccagggctaccaggaaagcatggtgcctctggaccacctggcaacaaaggggcgaagggtgacatggttgtatcaagagttaaagggcacaaaggagaaagaggtcctgatgggcccccaggatttccagggcagccaggatcacatggtcgggatggacatgctggagaaaaaggggatccaggacctccaggggatcatgaagatgcgaccccaggtggtaaaggatttcctggacctctgggccccccaggcaaagcaggacctgtggggcccccaggactgggatttcctggtccaccaggagagcgaggccacccaggagttccaggccacccaggtgtgaggggccctgatggcttgaagggtcagaaaggtgacacaatttcttgcaacgtaacctaccctgggaggcatggccctccaggttttgatggacctccaggtccgaagggatttccaggtccccaaggtgcccctgggctgagtggttcagatgggcataaaggcagacctggcacaccaggaacagcggaaataccaggtccacctggttttcgtggtgacatgggagatccgggttttggaggtgaaaaggggtcctcccctgttgggcccccaggccctcccggctcaccaggagtgaatggtcagaaaggaatcccgggagaccctgcatttggtcacctgggacccccgggaaagaggggtctttcaggagtgccagggataaaaggacccagaggtgatccgggatgtccaggggctgaagggccagctggcattcctggattcctaggtctcaaaggtcccaaaggcagagagggacatgctgggtttccaggtgtcccaggtccacctggccattcctgtgaaagaggtgctccagggataccagggcaaccgggactccctgggtatccaggtagcccaggtgctccaggtgggaaaggacagccgggagatgtggggcctcccgggccagctggaatgaaaggcctccccggactcccaggacggcctggggcacatggtcccccaggcctcccaggaatcccaggtccctttggagatgatgggctacctggtcctccaggtccaaagggaccccgggggctgcctggtttcccaggttttcccggagaaagaggaaagcctggtgcagagggatgtcctggcgcaaagggagaacctggagagaagggcatgtctggccttcctggagaccggggactgagaggggccaaaggagccataggacctcccggagatgaaggagaaatggctatcatttcacaaaagggaacacctggggaacctggacctcctggagatgatggattcccaggagaaagaggtgataaaggaactcccgggatgcaagggagaagaggagagccgggaagatacggaccacctggatttcacagaggggaacctggtgagaaaggtcagccagggcctcctggacccccaggccctccaggctcaactggtctaagagggttcattggttttccaggacttccaggtgaccagggtgagccaggttctccaggtccccctggattttcaggaattgatggagcaagaggacctaaaggaaacaaaggtgaccctgccagtcactttggtccacctggtccaaagggtgagccaggtagccctggatgtccagggcattttggagcatccggagagcagggcttgcctggtattcaagggcccagaggatcacctggaaggccagggccacctggctcctctggaccaccagggtgcccaggtgatcacgggatgcctgggctgaggggacagccaggagaaatgggagaccctgggccaagaggcctccagggggatccagggataccaggtcctccgggaataaaaggtccctccggatcacctggcctgaacggcttgcatggattgaaaggtcagaaaggaactaaaggtgcttcaggtttgcatgatgtggggccacctggtccagtgggaatacctgggctaaaaggggagagaggagaccctgggagcccaggaatctctcctccaggtcctcgtggaaagaaaggtcccccaggacccccagggagttcaggaccacctggtcctgcaggtgccacaggaagagctcctaaggacattcctgacccgggtccacctggagatcagggacctcctggtcctgatggcccaagaggagcacctgggcctccaggcctccctgggagtgttgaccttctgagaggggagccaggtgactgtggtctaccagggccaccaggtccccctggcccaccaggccctccaggatacaaaggctttccaggatgtgatggaaaagatggccagaaaggaccagtgggattcccgggaccgcagggaccacatggatttcctgggccacctggagagaagggtttacctggacctccagggagaaaagggcccactggtcttccgggtcccagaggtgaaccggggccacctgcagatgtggatgactgtccccgaatcccaggccttcctggggcgccaggcatgagaggaccagaaggagccatggggctccctggaatgagaggcccctcaggaccagggtgcaaaggagagcctgggctggatggcaggaggggtgtggatggcgtccctgggtctcctgggcctcccggacgtaaaggtgacacaggagaagacggctaccctggaggaccagggcctcctggtcccattggggatcctgggcccaaagggtttggccctggatacctcggtggcttcctcctggttctccacagtcagacggaccaggagcccacctgccccctgggcatgcccaggctctggactgggtatagtctgttatacctggaagggcaagagaaagctcacaatcaagaccttggtctggcagggtcttgccttcccgtatttagcacgctgccctttgcctactgcaacatccaccaggtgtgccactatgcccagagaaacgacagatcctactggctggccagcgctgcgcccctccccatgatgccactctctgaagaggcgatccgcccctatgtcagccgctgtgcggtatgcgaggccccggcccaggcggtggcggtgcacagccaggaccagtccatccccccatgtccgcagacctggaggagcctctggatcgggtattcattcctgatgcacacaggagctggggaccaaggaggagggcaggcccttatgtcacctggcagctgcctggaagatttcagagcagcaccattccttgaatgccagggccggcagggaacttgccactttttcgcaaataagtatagcttctggctcacaacggtgaaagcagacttgcagttttcctctgctccagcaccagacaccttaaaagaaagccaggcccaacgccagaaaatcagccggtgccaggtctgcgtgaagtatagctagagaatgcgaaattcaccaacacgtggccaagagaaacttcctagggggctaagacttcctagactgtgctaagagatgtcatggtgctcattttggactccctttcagtggttccttctgttttgtcgtggttattcccagagtcctctggttccttacacattaagcaaatgctgcacagatggatttgtttggacctcccaatctagggagcctagatactcttattttactgaggatgatcgaagaactggctttacttaaaaatatgctaattctcagaaaggcaagtagatgataaaggccagattacaaattacattactgaaaacttcattcttgggttaacagtatctcaaacaattgaagtcaattactctataatacagtgggcttctggatggattttataggaaaaaataaacaggtcaatgaatgaaactagaaagcagagattttcaacatttcaaaatgatttcctctgtaatctatttttccatatactttaaataatggtaaaaccatgacgcaaagagagatttttttttaaagaagaaaaaaaaaaattcacactgccagcgttaacagttcctttcaaaggagaatgaatcatgatggcaggaaggcccacagtcgccgtattccagagatgcgacattagcataaacacatcacagatgaatataaaacattatgttctcttctgcatttttcagagaatagaaatgcctactttggcaacccttttgaaaagtagcaattatggaaaaaaaatattcaataagagattaggagcctaaaagctattagtgaatattaaggtagttattcacaaaaattgactccccattgcagtgaacttccagacagactgcttttccccagtcggggtccggcgtgtcacaggtgcgtgcgtgctaatgggactgacgctacatggggctcactcaggcaggcacgcgcttcatacaaagcatctcactcccctccccaggagagcctgcacagcttcttgcactcacaacggacactttgctccacacacataatggcagctcacacagggacgtgacagagctatcattatgcacttgggagaaaattaagggccgatttaattaaacttaggtaagaagattcatttaagtcagggttaccccatcaggaggacatggcactatctttaaacgaaacaaagacaatttataatttgaattttatgctcccgtggttggctgttacaggagcatcccattttgccaattttaaagacattcttatatttcatatcagtcttgtaccaaggcaacagtttgacatttggcattagtattttctaaaaaagtttagaatgtgtgtcaatttataatgattatttttttctgtaaagcaaaagatccctttttctgttttgctaggaatttggtgatctaatcctaaatttaaaagatttgttggaaaaaatttttaggaaactcaccttcctcatctaaaagaaaaaggcattttagagaaaactaaagaaatttctcatgagcgtgacactcattttagtgctttgtttccgtgcacttaaaaataattgagaagaaaaactcaattaaaattttgtttataagaaatgttttccttgccaaaccttgatttgtaatgagctcttatatgcagaacacatttcaaatgagttttgctatgggctgcccccagggtggcaatttattttaagagtattttctggtaaaaagaaaaatgtgtattttaagatgaaatattttcttgatgtagcagaatatttcctagttcatttgacccatttgatattttttaaaccatgctctggcatgttgaatatttttgtgcacctaaaacttaagccaatttcaatcttatttgtgattacctttctccttcccaaaaagctttatctattaccaaaagtcaaccctcctaaaagttcaacctgttcatcttgaacttggcctgagaacattttctgggaagaggtaagggtgacaaatggaacatcagaaacgtatcttgcttgctaattattttaaacactttaatgttggtattagaatattatcttcataagttaataaataagtaaaaaaaaaaaacccacacaaagacaggctaaattatgtagacagtttactccacagtgagcttgggaaggtatcagactgttcaaaatgttagtattacaagagctgtctctaaatgcagcattaacactgccctctaattttacaaaagtattttaaaggatcaaaagggcggaaaaataacttcttggaatagaagatcctgttaccttaaaccattattttcttcacctggttatatatcaatgtgccttcaattaccctttctctgtggaggtgatgaacaaagcttttaagttgttctcctaacccattattggagatgatccttatcaaacccttctctccctgcctccccaccaaccttgtagactggaacgtgcctagattgccctaatgggaactgttctgttctgtgcccgtgctggaaatctgggatgcttccttctgggttctgattctcagtgagtggagcccattcatccaggcaggtttccatgctatgagtggccctttcgttctgctctcacactccccacattgaaagctgagtcatcgctgctttggatggctacctcctctttagccccgtgcccgtctcacacagcctttgttttccacctccacccttgcagtaggcatctcccagttggtgccttagtttcaaatcccagttgccatctaagatccacccaaacttgattttgtcaccctctggattagaatccttctgtgactccgctgcccatgaagtccaaatgacttcctatggggtgaaaggtccagtggggactgttcgagggttccctctaggagtatttcctgtcatgatgaactgtgtgcagctctgcagacactcccagcacctcttcgactttgctcctgcttcaccagtgatgtcctccctggggtcagtttaccctgcgtgggaggtgaattccctgggggaaacttaggctcccttctgctgctcttgtgcagtgcacggggctgtcctcattttctccgttccccattgcttctttaatgtctcagtgcacttccttcattccattgccaaaatgcaagccccttgagggcagggaccatgcttgactcgtttttgtatgcctaatgcctagcacagagttgaacacattactgccaattcatttttttcaatgacaattccataaacatcattaggcattaggtgttcagctctgcatataaggtcttcatcagcaagacggttacaagtataaaccatttcctatttcagaatattttaatattcaacatatttgtatacccacattctcttgttacaattattgccagaaagccaattgataagctttcaaaatgggcttatcacacccctccaaaaatagatttttgttttttctataaacagaaatttcagaaatgagatttgagagatccgactgagaagacccttcagtaaaatgtgacatgacttaccttatgctgtaatctgtattccctcaggatttaagagcttcctagcataaaatctttgctaaacgtttgtgtacatgttattggtgctccgaaaaatagtcaatggaatggtgcactacaattgggctttatcatcttattttgaacctcgtgtagattacagtaaagcaaaccattcagtgtgttccaggaaattatattagatctgtgtttctatcagctcactggaataatctgataattgttacttttacttggtatggctgcaagaatagtggaaagaagaggacttgagagttggtcgaacccaggtttgaaatctggcttagtcatttttcagctgttatcctgggtgagttttgccaactttcttagcttcatttccctcattaatacggtgggacataacagctactcttgcattgaaaattaagttagattacctgtctagcatacccatcatcatacacttactatggtcacattttgtatttaaaataaactaatacgaaaaatatttctttttttttacacagaattatgattctcacagggtatataaattactgattagaattatttatatgtggccaattcttaatgtcattgggaatgctgtttcatttcaatcctcaaagttactgtagcacagaaaatatcacaatttcctgcagggacattatcagtaagttctgcagggaacaaacaattgacattaaaaatcagtactctgcaattgtcactgttatcatctgctagaaactctgcataatgcattttaaaccaccaaggctggctgccacatccatgtgaaatgcttgaattttatggtgcttaaatatttaatgattcatgggaaaaatgtgaaatgtgtctaataaattgcatccctttctctaacctctggttgtaaagttaaagactttcagcatgtaacttttgcaagatgcctggtctgccattggcacttaaatatttgttgtattacgatttataatatggttcattatatataaaattctgtgatgacttccaaaaacaa

SEQ ID NO: 67 - DNA, 6445 bp, Homo sapiens
aggggggaaggaagagtagctccttcttcttcttcttttttttttcttccactcttaaaaagcttctttctcttcacccaagcctcactgtccctctccggctctagctctctccatataaaccctcaagattatgtcaattggttagagccagccgggaatttcgtgcgggtgctgaaggagctgcgggagccggagaagaatgaaactgcgtggagtcagcctggctgccggcttgttcttactggccctgagtctttgggggcagcctgcagaggctgcggcttgctatgggtgttctccaggatcaaagtgtgactgcagtggcataaaaggggaaaagggagagagagggtttccaggtttggaaggacacccaggattgcctggatttccaggtccagaagggcctccggggcctcggggacaaaagggtgatgatggaattccagggccaccaggaccaaaaggaatcagaggtcctcctggacttcctggatttccagggacaccaggtcttcctggaatgccaggccacgatggggccccaggacctcaaggtattcccggatgcaatggaaccaagggagaacgtggatttccaggcagtcccggttttcctggtttacagggtcctccaggaccccctgggatcccaggtatgaagggtgaaccaggtagtataattatgtcatcactgccaggaccaaagggtaatccaggatatccaggtcctcctggaatacaaggcctacctggtcccactggtataccagggccaattggtcccccaggaccaccaggtttgatgggccctcctggtccaccaggacttccaggacctaaggggaatatgggcttaaatttccagggacccaaaggtgaaaaaggtgagcaaggtcttcagggcccacctgggccacctgggcagatcagtgaacagaaaagaccaattgatgtagagtttcagaaaggagatcagggacttcctggtgaccgagggcctcctggacctccagggatacgtggtcctccaggtcccccaggtggtgagaaaggtgagaagggtgagcaaggagagccaggcaaaagaggtaaaccaggcaaagatggagaaaatggccaaccaggaattcctggtttgcctggtgatcctggttaccctggtgaacccggaagggatggtgaaaagggccaaaaaggtgacactggcccacctggacctcctggacttgtaattcctagacctgggactggtataactataggagaaaaaggaaacattgggttgcctgggttgcctggagaaaaaggagagcgaggatttcctggaatacagggtccacctggccttcctggacctccaggggctgcagttatgggtcctcctggccctcctggatttcctggagaaaggggtcagaaaggtgatgaaggaccacctggaatttccattcctggacctcctggacttgacggacagcctggggctcctgggcttccagggcctcctggccctgctggccctcacattcctcctagtgatgagatatgtgaaccaggccctccaggccccccaggatctccaggtgataaaggactccaaggagaacaaggagtgaaaggtgacaaaggtgacacttgcttcaactgcattggaactggtatttcagggcctccaggtcaacctggtttgccaggtctcccaggtcctccaggatctcttggtttccctggacagaaaggggaaaaaggacaagctggtgcaactggtcccaaaggattaccaggcattccaggagctccaggtgctccaggctttcctggatctaaaggtgaacctggtgatatcctcacttttccaggaatgaagggtgacaaaggagagttgggttcccctggagctccagggcttcctggtttacctggcactcctggacaggatggattgccagggcttcctggcccgaaaggagagcctggtggaattacttttaagggtgaaagaggtccccctgggaacccaggtttaccaggcctcccagggaatatagggcctatgggtccccctggtttcggccctccaggcccagtaggtgaaaaaggcatacaaggtgtggcaggaaatccaggccagccaggaataccaggtcctaaaggggatccaggtcagactataacccagccggggaagcctggcttgcctggtaacccaggcagagatggtgatgtaggtcttccaggtgaccctggacttccagggcaaccaggcttgccagggatacctggtagcaaaggagaaccaggtatccctggaattgggcttcctggaccacctggtcccaaaggctttcctggaattccaggacctccaggagcacctgggacacctggaagaattggtctagaaggccctcctgggccacccggctttccaggaccaaagggtgaaccaggatttgcattacctgggccacctgggccaccaggacttccaggtttcaaaggagcacttggtccaaaaggtgatcgtggtttcccaggacctccgggtcctccaggacgcactggcttagatgggctccctggaccaaaaggtgatgttggaccaaatggacaacctggaccaatgggacctcctgggctgccaggaataggtgttcagggaccaccaggaccaccagggattcctgggccaataggtcaacctggtttacatggaataccaggagagaagggggatccaggacctcctggacttgatgttccaggacccccaggtgaaagaggcagtccagggatccccggagcacctggtcctataggacctccaggatcaccagggcttccaggaaaagcaggtgcctctggatttccaggtaccaaaggtgaaatgggtatgatgggacctccaggcccaccaggacctttgggaattcctggcaggagtggtgtacctggtcttaaaggtgatgatggcttgcagggtcagccaggacttcctggccctacaggagaaaaaggtagtaaaggagagcctggccttccaggccctcctggaccaatggatccaaatcttctgggctcaaaaggagagaagggggaacctggcttaccaggtatacctggagtttcagggccaaaaggttatcagggtttgcctggagacccagggcaacctggactgagtggacaacctggattaccaggaccaccaggtcccaaaggtaaccctggtctccctggacagccaggtcttataggacctcctggacttaaaggaaccatcggtgatatgggttttccagggcctcagggtgtggaagggcctcctggaccttctggagttcctggacaacctggctccccaggattacctggacagaaaggcgacaaaggtgatcctggtatttcaagcattggtcttccaggtcttcctggtccaaagggtgagcctggtctgcctggatacccagggaaccctggtatcaaaggttctgtgggagatcctggtttgcccggattaccaggaacccctggagcaaaaggacaaccaggccttcctggattcccaggaaccccaggccctcctggaccaaaaggtattagtggccctcctgggaaccccggccttccaggagaacctggtcctgtaggtggtggaggtcatcctgggcaaccagggcctccaggcgaaaaaggcaaacccggtcaagatggtattcctggaccagctggacagaagggtgaaccaggtcaaccaggctttggaaacccaggaccccctggacttccaggactttctggccaaaagggtgatggaggattacctgggattccaggaaatcctggccttccaggtccaaagggcgaaccaggctttcacggtttccctggtgtgcagggtcccccaggccctcctggttctccgggtccagctctggaaggacctaaaggcaaccctgggccccaaggtcctcctgggagaccaggtcctacaggttttcaaggtctaccaggtccagaaggtcctccaggtctccctggaaatggaggtattaaaggagagaagggaaatccaggccaacctgggctacctggcttgcctggtttgaaaggagatcaaggaccaccaggactccagggtaatcctggccggccgggtctcaatggaatgaaaggagatcctggtctccctggtgttccaggattcccaggcatgaaaggacccagtggagtacctggatcagctggccctgagggggaaccgggacttattggtcctccaggtcctcctggattacctggtccttcaggacagagtatcataattaaaggagatgctggtcctccaggaatccctggccagcctgggctaaagggtctaccaggaccccaaggacctcaaggcttaccaggtccaactggccctccaggagatcctggacgcaatggactccctggctttgatggtgcaggagggcgcaaaggagacccaggtctgccaggacagccaggtacccgtggtttggatggtccccctggtccagatggattgcaaggtcccccaggtccccctggaacctcctctgttgcacatggatttcttattacacgccacagccagacaacggatgcaccacaatgcccacagggaacacttcaggtctatgaaggcttttctctcctgtatgtacaaggaaataaaagagcccacggtcaagacttggggacggctggcagctgccttcgtcgctttagtaccatgcctttcatgttctgcaacatcaataatgtttgcaactttgcttcaagaaatgactattcttactggctctctaccccagagcccatgccaatgagcatgcaacccctaaagggccagagcatccagccattcattagtcgatgtgcagtatgtgaagctccagctgtggtgatcgcagttcacagtcagacgatccagattccccattgtcctcagggatgggattctctgtggattggttattccttcatgatgcatacaagtgcaggggcagaaggctcaggtcaagccctagcctcccctggttcctgcttggaagagtttcgttcagctcccttcatcgaatgtcatgggaggggtacctgtaactactatgccaactcctacagcttttggctggcaactgtagatgtgtcagacatgttcagtaaacctcagtcagaaacgctgaaagcaggagacttgaggacacgaattagccgatgtcaagtgtgcatgaagaggacataacattttgaagaattccttttgtgttttaaaatgtgatatatatatatataaaattcctaggatgcagtgtctcattgtccccaactttactactgctgccgtcaatggtgctactatatatgatcaagataacatgctgactagtaaccatgaagattcagatgtacctcagcaatgcgccagagcaaagtctctattatttttctactaaagaaataaggaagtgaatttactttttgggtccagaatgactttctccaagaattataagatgaaaattatatattttgcccagttactaaaatggtacattaaaaattcaattaagagaagagtcacattgagtaaaataaaagactgcagtttgtgggaagaattatttttcacggtgctactaatcctgctgtatcccgggtttttaatataaaggtgttaagcttattttgctttgtaagtaaagaatgtgtatattgtgaacagccttttagctcaaaatgttgagtcatttacatatgacatagcatgaatcactctttacagaaaatgtaggaaaccctagaatacagacagcaatattttatattcatgtttatcaaagtgagaggacttatattcctacatcaagttactactgagagtaaatttattttgagttttatcccgtaagttctgttttgattttttttaaaaaacaaacccttttagtcactttaatcagaattttaaatgttcatgttacataccaaattataatatctaatggagcaatttgtcttttgctatattctccaagattatctcttaagaccatatgccccctgttttaatgtttcttacatcttgtttttactcatttctgactggacaaagttcttccaaacaattctgagaaacaaaaacacacacgcagaattaacaattcttttccctgtgcttcttatgtaagaatcctcctgtggcctctgcttgtacagaactgggaaacaacacttggttagtctcttttaagttacaaaaagccaattgatgtttcttattctttttaaattttaaatattttgttataaatactcacaggataccttatttccctagctatcatctcctgacttaatgttttttaaacccaccaatataaatttaattaaagatatatgttgtaaggat

SEQ ID NO: 68 - DNA, 6595 bp, Homo sapiens
gctccctgggctgctggtcttctttaccttccagctgctcacagaacagagagtttctacatacaagcagaagatgtgaaaatattgggaataaataaagtatatgcttataaacaagttgtggctgctcctggttacgttgtgcctgaccgaggaactggcagcagcgggagagaagtcttatggaaagccatgtgggggccaggactgcagtgggagctgtcagtgttttcctgagaaaggagcgagaggacgacctggaccaattggaattcaaggcccaacaggtcctcaaggattcactggctctactggtttatcgggattgaaaggagaaaggggtttcccaggccttctgggaccttatggaccaaaaggagataagggtcccatgggagttcctggctttcttggcatcaatgggattccgggccaccctggacaaccaggccccagaggcccacctggtctggatggctgtaatggaactcaaggagctgttggatttccaggccctgatggctatcctgggcttctcggaccacccgggcttcctggtcagaaaggatcaaaaggtgaccctgtccttgctccaggtagtttcaaaggaatgaagggggatcctgggctgcctggactggatggaatcactggcccacaaggagcacccggatttcctggagctgtaggacctgcaggaccaccaggattacaaggtcctccagggcctcctggtcctcttggtcctgatgggaatatggggctaggttttcaaggagagaaaggagtcaagggggatgttggcctccctggcccagcaggacctccaccatctactggagagctggaattcatgggattccccaaagggaagaaaggatccaagggtgaaccagggcctaagggttttccaggcataagtggccctccaggcttcccgggccttggaactactggagaaaagggagaaaagggagaaaagggaatccctggtttgccaggacctaggggtcccatgggttcagaaggagtccaaggccctccagggcaacagggcaagaaagggaccctgggatttcctgggcttaatggattccaaggaattgagggtcaaaagggtgacattggcctgccaggcccagatgttttcatcgatatagatggtgctgtgatctcaggtaatcctggagatcctggtgtacctggcctcccaggccttaaaggagatgaaggcatccaaggcctacgtggcccttctggtgtccctggattgccagcattatcaggtgtcccaggagccctagggcctcagggatttccagggctgaagggggaccaaggaaacccaggccgtaccacaattggagcagctggcctccctggcagagatggtttgccaggcccaccaggtccaccaggcccacctagtccagaatttgagactgaaactctacacaacaaagagtcagggttccctggtctccgaggagaacaaggtccaaaaggaaacctaggcctcaaaggaataaaaggagactcaggtttctgtgcttgtgacggtggtgttcccaacactggaccacccggggaaccaggcccacctggtccatggggtctcataggccttccaggccttaaaggagccagaggagatcgaggctctgggggtgcacagggcccagcaggggctccaggcttagttgggcctctgggtccttcaggacccaaaggaaagaagggggaaccaattctcagtacaatccaaggaatgccaggagatcggggtgattctggctcccagggcttccgtggtgtaataggagaaccaggcaaggacggagtaccaggtttaccaggtctgccaggccttccgggtgatggtggacagggcttcccaggtgaaaaggggttacctggacttcctggtgaaaaaggccatcctggtccacctggcctcccaggaaatgggttaccaggacttcctggaccccgtgggcttcctggagataaaggcaaggatggattaccgggacaacaaggccttcccggatctaagggaatcaccctgccctgtattattcctgggtcatacggtccatcaggatttccaggcactcccggattcccaggccctaaagggtctcgaggcctccctgggaccccaggccagcctgggtcaagtggaagtaaaggagagccagggagtccaggattggttcatcttcctgaattaccaggatttcctggacctcgtggggagaagggcttgcctgggtttcctgggctccctggaaaagatggcttgcctgggatgattggcagtccaggcttacctggttccaagggagccactggtgacatctttggtgctgaaaatggtgctccgggggaacaaggcctacaaggattaacagggcacaaaggatttcttggagactctggccttccaggactcaagggtgtgcacgggaagcctggcttactaggccccaaaggtgagcggggcagccctgggacaccaggacaggtgggacagccaggcaccccaggatctagtggtccatatggcatcaagggcaaatctgggctcccaggagcaccaggcttcccaggcatctcaggacatcctggaaagaaaggaacaagaggcaagaaaggtcctcctggatcaattgtaaagaaagggctgccagggctaaaaggccttcctggaaatccaggcctagtaggactgaaaggaagcccaggctctccaggggtcgctgggttgccagccctctctggacccaagggagagaaggggtctgttggattcgtaggttttccaggaataccaggtctgcctggtattcctggaacaagaggattaaaaggaattccaggatcaactggaaaaatgggaccatctggacgtgctggtactcctggtgaaaagggagacagaggcaatccggggccagtcggaatacctagtccaagacgtccaatgtcaaacctttggctcaaaggagacaaaggctctcaaggctcagccggatccaatggatttcctgggccaagaggtgacaaaggagaggctggtcgacctggaccaccaggcctacctggagctcctggcctcccaggcattatcaaaggagttagtggaaagccagggccccctggcttcatgggaatccggggcttacctggcctgaaggggtcctctgggatcacaggtttcccaggaatgccaggagaaagtggttcacaaggtatcagagggtcgcctggactcccaggagcatctggtctcccaggcctgaaaggagacaacggccagacagttgaaatttccggtagcccaggacccaagggacagcctggcgaatctggttttaaaggcacaaaaggaagagatggactaataggcaatataggcttccctggaaacaaaggtgaagatggaaaagttggtgtttctggagatgttggccttcctggagctccaggatttccaggagttgccggcatgagaggagaaccaggacttccaggttcttctggtcaccaaggggcaattgggcctctaggatcccccggattaataggacccaaaggcttccctggatttcctggtttacatggactgaatgggcttccgggcaccaagggtacccatggcactccaggacctagtatcaccggtgtgcctgggcctgctggtctccctggacccaaaggagaaaaaggatatccaggaattggcatcggagctccagggaagccgggcctgagagggcaaaaaggtgatcgaggtttcccaggtctccagggccctgctggtctccccggtgccccaggcatctccttgccctcactcatagcaggacagcctggtgaccccgggcgaccaggcctagatggagaacgaggccgcccaggccccgctggacccccaggtccccctgggccatcctcgaatcaaggcgacaccggagaccctggcttccctggaattcctggacctaaagggcctaagggagaccaaggaattccaggtttttctggcctccctggagagctaggactgaaaggcatgagaggtgagcctggcttcatggggactccaggcaaggttgggccacctggagacccaggatttcccggaatgaaggggaaggcagggccaagaggctcttctggcctccaaggtgatcctggacaaacaccaactgcagaagctgtccaggttcctcctggacccttgggtctaccagggatcgatggcatccctggcctcactggggaccctggggctcaaggccctgtaggcctacaaggctccaaaggtttacctggcatccccggtaaagatggccccagtgggctcccaggcccacctggggctcttggtgatcctggtctgcctggactgcaaggccctccaggatttgaaggagctccagggcagcaaggccccttcgggatgcctggaatgcctggccagagcatgagagtgggctacacgttggtaaagcacagccagtcggaacaggtgcccccgtgtcccatcgggatgagccagctgtgggtggggtacagcttactgtttgtggaggggcaagagaaagcccacaaccaggacctgggctttgctggctcctgtctgccccgcttcagcaccatgcccttcatctactgcaacatcaacgaggtgtgccactatgccaggcgcaatgataaatcttactggctctccactaccgcccctatccccatgatgcccgtcagccagacccagattccccagtacatcagccgctgctctgtgtgtgaggcaccctcgcaagccattgctgtgcacagccaggacatcaccatcccgcagtgccccctgggctggcgcagcctctggattgggtactctttcctcatgcacactgccgctggtgccgagggtggaggccagtccctggtctcacctggctcctgcctagaggactttcgggccactcctttcatcgaatgcagtggtgcccgaggcacctgccactactttgcaaacaagtacagtttctggttgaccacagtggaggagaggcagcagtttggggagttgcctgtgtctgaaacgctgaaagctgggcagctccacactcgagtcagtcgctgccaggtgtgtatgaaaagcctgtagggtggcacctgccactctgccccttgccctcccctgcccctcacaacagtcacctcacaaacctgaatggtctgaagaaggaaggcctgagcccctttgcctgtcaagttgtacattggagtctcatttgggctagactaccggacactcgtcaccccagccctcgggtccatagagatgagcccaccctgctgagatctgctgtcctgtttctgtcaagctggtgctactgtttgatttggatgattgtgtgactattcatggctacctcagaaagatttgatgggccacaactgtcttagactgctagctttctccttaccgtcttgatcggaaagctcttcctaatcgctaatcagtcatttcttcatgtacagaggtcagcacacattatttggcttaaaccagaacccagtgtttccacacttaaattctctaaccgaatattcatggatggctcaagtctgcacagagcaagtcctcactcttcaaggaggcccactgtgtctaggcaggcaagagaattgaaatgaggtgccacccagtagcccagagtgagctttagctctctctagaatgagcaagactgggccccacatggcttagagaggcttgaaggccagcagctgggttgggggtggtggtcattaatggcatatggtcctagacaaaccatctcctccttgccggctccccctccagccagagacagaggatgtggcctggttcaaagtaaagcagaggatgcaacaaatgtggccaagcctatcaaaggaaatgagaatgacagccttttttcctgggccagaagtagaggggtgggtgcgtaaggatgtgtgagttttgcttttgactccaggaacaaaaaggtaaatcccacatcccagtttctcagaagtccctgtttattccaaatgccatccagatgtgtgcaatgtggcaaactgaagctgcacagtgttggtttccttgtattctgaggatgttaaagactttgttaaatggttatccaattgctctttcacaggtagcctattaaactattttaatatgtttttttaaacctcataaaaatctagcacactcttctcttgagcagttagcagacctaaagcaagcctgaattggctatgcagtacattgtattctgtttgggggaatttgttttagccattttctttaattaccagttttccagaacactcttagctatgttgacatgaggcagttccttccaggtgattctgtttccttaagtattatataaactgtgccaatacagacaaagcataatcaatataatctgaattattgttatctttacctcctgagtaataagcatggtgtcagttttgtacatagcaaataaaataaatgaaatctgaacatgtgaaaaaaaaaaaaaaaaaaaaaaaa

SEQ ID NO: 69 - DNA, 10083 bp, Homo sapiens
ctgcggggcgctgttgctgtggctgagatttggccgccgcctcccccacccggcctgcgccctccctctccctcggcgcccgcccgcccgctcgcggcccgcgctcgctcctctccctcgcagccggcagggcccccgacccccgtccgggccctcgccggcccggccgcccgtgcccggggctgttttcgcgagcaggtgaaaatggctgagaacttgctggacggaccgcccaaccccaaaagagccaaactcagctcgcccggtttctcggcgaatgacagcacagattttggatcattgtttgacttggaaaatgatcttcctgatgagctgatacccaatggaggagaattaggccttttaaacagtgggaaccttgttccagatgctgcttccaaacataaacaactgtcggagcttctacgaggaggcagcggctctagtatcaacccaggaataggaaatgtgagcgccagcagccccgtgcagcagggcctgggtggccaggctcaagggcagccgaacagtgctaacatggccagcctcagtgccatgggcaagagccctctgagccagggagattcttcagcccccagcctgcctaaacaggcagccagcacctctgggcccacccccgctgcctcccaagcactgaatccgcaagcacaaaagcaagtggggctggcgactagcagccctgccacgtcacagactggacctggtatctgcatgaatgctaactttaaccagacccacccaggcctcctcaatagtaactctggccatagcttaattaatcaggcttcacaagggcaggcgcaagtcatgaatggatctcttggggctgctggcagaggaaggggagctggaatgccgtaccctactccagccatgcagggcgcctcgagcagcgtgctggctgagaccctaacgcaggtttccccgcaaatgactggtcacgcgggactgaacaccgcacaggcaggaggcatggccaagatgggaataactgggaacacaagtccatttggacagccctttagtcaagctggagggcagccaatgggagccactggagtgaacccccagttagccagcaaacagagcatggtcaacagtttgcccaccttccctacagatatcaagaatacttcagtcaccaacgtgccaaatatgtctcagatgcaaacatcagtgggaattgtacccacacaagcaattgcaacaggccccactgcagatcctgaaaaacgcaaactgatacagcagcagctggttctactgcttcatgctcataagtgtcagagacgagagcaagcaaacggagaggttcgggcctgctcgctcccgcattgtcgaaccatgaaaaacgttttgaatcacatgacgcattgtcaggctgggaaagcctgccaagccatcctggggtctccagctagtggaattcaaaacacaattggttctgttggcacagggcaacagaatgccacttctttaagtaacccaaatcccatagaccccagctccatgcagcgagcctatgctgctctcggactcccctacatgaaccagccccagacgcagctgcagcctcaggttcctggccagcaaccagcacagcctcaaacccaccagcagatgaggactctcaaccccctgggaaataatccaatgaacattccagcaggaggaataacaacagatcagcagcccccaaacttgatttcagaatcagctcttccgacttccctgggggccacaaacccactgatgaacgatggctccaactctggtaacattggaaccctcagcactataccaacagcagctcctccttctagcaccggtgtaaggaaaggctggcacgaacatgtcactcaggacctgcggagccatctagtgcataaactcgtccaagccatcttcccaacacctgatcccgcagctctaaaggatcgccgcatggaaaacctggtagcctatgctaagaaagtggaaggggacatgtacgagtctgccaacagcagggatgaatattatcacttattagcagagaaaatctacaagatacaaaaagaactagaagaaaaacggaggtcgcgtttacataaacaaggcatcttggggaaccagccagccttaccagccccgggggctcagccccctgtgattccacaggcacaacctgtgagacctccaaatggacccctgtccctgccagtgaatcgcatgcaagtttctcaagggatgaattcatttaaccccatgtccttggggaacgtccagttgccacaagcacccatgggacctcgtgcagcctccccaatgaaccactctgtccagatgaacagcatgggctcagtgccagggatggccatttctccttcccgaatgcctcagcctccgaacatgatgggtgcacacaccaacaacatgatggcccaggcgcccgctcagagccagtttctgccacagaaccagttcccgtcatccagcggggcgatgagtgtgggcatggggcagccgccagcccaaacaggcgtgtcacagggacaggtgcctggtgctgctcttcctaaccctctcaacatgctggggcctcaggccagccagctaccttgccctccagtgacacagtcaccactgcacccaacaccgcctcctgcttccacggctgctggcatgccatctctccagcacacgacaccacctgggatgactcctccccagccagcagctcccactcagccatcaactcctgtgtcgtcttccgggcagactcccaccccgactcctggctcagtgcccagtgctacccaaacccagagcacccctacagtccaggcagcagcccaggcccaggtgaccccgcagcctcaaaccccagttcagcccccgtctgtggctacccctcagtcatcgcagcaacagccgacgcctgtgcacgcccagcctcctggcacaccgctttcccaggcagcagccagcattgataacagagtccctaccccctcctcggtggccagcgcagaaaccaattcccagcagccaggacctgacgtacctgtgctggaaatgaagacggagacccaagcagaggacactgagcccgatcctggtgaatccaaaggggagcccaggtctgagatgatggaggaggatttgcaaggagcttcccaagttaaagaagaaacagacatagcagagcagaaatcagaaccaatggaagtggatgaaaagaaacctgaagtgaaagtagaagttaaagaggaagaagagagtagcagtaacggcacagcctctcagtcaacatctccttcgcagccgcgcaaaaaaatctttaaaccagaggagttacgccaggccctcatgccaaccctagaagcactgtatcgacaggacccagagtcattacctttccggcagcctgtagatccccagctcctcggaattccagactattttgacatcgtaaagaatcccatggacctctccaccatcaagcggaagctggacacagggcaataccaagagccctggcagtacgtggacgacgtctggctcatgttcaacaatgcctggctctataatcgcaagacatcccgagtctataagttttgcagtaagcttgcagaggtctttgagcaggaaattgaccctgtcatgcagtcccttggatattgctgtggacgcaagtatgagttttccccacagactttgtgctgctatgggaagcagctgtgtaccattcctcgcgatgctgcctactacagctatcagaataggtatcatttctgtgagaagtgtttcacagagatccagggcgagaatgtgaccctgggtgacgacccttcacagccccagacgacaatttcaaaggatcagtttgaaaagaagaaaaatgataccttagaccccgaacctttcgttgattgcaaggagtgtggccggaagatgcatcagatttgcgttctgcactatgacatcatttggccttcaggttttgtgtgcgacaactgcttgaagaaaactggcagacctcgaaaagaaaacaaattcagtgctaagaggctgcagaccacaagactgggaaaccacttggaagaccgagtgaacaaatttttgcggcgccagaatcaccctgaagccggggaggtttttgtccgagtggtggccagctcagacaagacggtggaggtcaagcccgggatgaagtcacggtttgtggattctggggaaatgtctgaatctttcccatatcgaaccaaagctctgtttgcttttgaggaaattgacggcgtggatgtctgcttttttggaatgcacgtccaagaatacggctctgattgcccccctccaaacacgaggcgtgtgtacatttcttatctggatagtattcatttcttccggccacgttgcctccgcacagccgtttaccatgagatccttattggatatttagagtatgtgaagaaattagggtatgtgacagggcacatctgggcctgtcctccaagtgaaggagatgattacatcttccattgccacccacctgatcaaaaaatacccaagccaaaacgactgcaggagtggtacaaaaagatgctggacaaggcgtttgcagagcggatcatccatgactacaaggatattttcaaacaagcaactgaagacaggctcaccagtgccaaggaactgccctattttgaaggtgatttctggcccaatgtgttagaagagagcattaaggaactagaacaagaagaagaggagaggaaaaaggaagagagcactgcagccagtgaaaccactgagggcagtcagggcgacagcaagaatgccaagaagaagaacaacaagaaaaccaacaagaacaaaagcagcatcagccgcgccaacaagaagaagcccagcatgcccaacgtgtccaatgacctgtcccagaagctgtatgccaccatggagaagcacaaggaggtcttcttcgtgatccacctgcacgctgggcctgtcatcaacaccctgccccccatcgtcgaccccgaccccctgctcagctgtgacctcatggatgggcgcgacgccttcctcaccctcgccagagacaagcactgggagttctcctccttgcgccgctccaagtggtccacgctctgcatgctggtggagctgcacacccagggccaggaccgctttgtctacacctgcaacgagtgcaagcaccacgtggagacgcgctggcactgcactgtgtgcgaggactacgacctctgcatcaactgctataacacgaagagccatgcccataagatggtgaagtgggggctgggcctggatgacgagggcagcagccagggcgagccacagtcaaagagcccccaggagtcacgccggctgagcatccagcgctgcatccagtcgctggtgcacgcgtgccagtgccgcaacgccaactgctcgctgccatcctgccagaagatgaagcgggtggtgcagcacaccaagggctgcaaacgcaagaccaacgggggctgcccggtgtgcaagcagctcatcgccctctgctgctaccacgccaagcactgccaagaaaacaaatgccccgtgcccttctgcctcaacatcaaacacaagctccgccagcagcagatccagcaccgcctgcagcaggcccagctcatgcgccggcggatggccaccatgaacacccgcaacgtgcctcagcagagtctgccttctcctacctcagcaccgcccgggacccccacacagcagcccagcacaccccagacgccgcagccccctgcccagccccaaccctcacccgtgagcatgtcaccagctggcttccccagcgtggcccggactcagccccccaccacggtgtccacagggaagcctaccagccaggtgccggcccccccacccccggcccagccccctcctgcagcggtggaagcggctcggcagatcgagcgtgaggcccagcagcagcagcacctgtaccgggtgaacatcaacaacagcatgcccccaggacgcacgggcatggggaccccggggagccagatggcccccgtgagcctgaatgtgccccgacccaaccaggtgagcgggcccgtcatgcccagcatgcctcccgggcagtggcagcaggcgccccttccccagcagcagcccatgccaggcttgcccaggcctgtgatatccatgcaggcccaggcggccgtggctgggccccggatgcccagcgtgcagccacccaggagcatctcacccagcgctctgcaagacctgctgcggaccctgaagtcgcccagctcccctcagcagcaacagcaggtgctgaacattctcaaatcaaacccgcagctaatggcagctttcatcaaacagcgcacagccaagtacgtggccaatcagcccggcatgcagccccagcctggcctccagtcccagcccggcatgcaaccccagcctggcatgcaccagcagcccagcctgcagaacctgaatgccatgcaggctggcgtgccgcggcccggtgtgcctccacagcagcaggcgatgggaggcctgaacccccagggccaggccttgaacatcatgaacccaggacacaaccccaacatggcgagtatgaatccacagtaccgagaaatgttacggaggcagctgctgcagcagcagcagcaacagcagcagcaacaacagcagcaacagcagcagcagcaagggagtgccggcatggctgggggcatggcggggcacggccagttccagcagcctcaaggacccggaggctacccaccggccatgcagcagcagcagcgcatgcagcagcatctccccctccagggcagctccatgggccagatggcggctcagatgggacagcttggccagatggggcagccggggctgggggcagacagcacccccaacatccagcaagccctgcagcagcggattctgcagcaacagcagatgaagcagcagattgggtccccaggccagccgaaccccatgagcccccagcaacacatgctctcaggacagccacaggcctcgcatctccctggccagcagatcgccacgtcccttagtaaccaggtgcggtctccagcccctgtccagtctccacggccccagtcccagcctccacattccagcccgtcaccacggatacagccccagccttcgccacaccacgtctcaccccagactggttccccccaccccggactcgcagtcaccatggccagctccatagatcagggacacttggggaaccccgaacagagtgcaatgctcccccagctgaacacccccagcaggagtgcgctgtccagcgaactgtccctggtcggggacaccacgggggacacgctagagaagtttgtggagggcttgtagcattgtgagagcatcaccttttccctttcatgttcttggaccttttgtactgaaaatccaggcatctaggttctttttattcctagatggaactgcgacttccgagccatggaagggtggattgatgtttaaagaaacaatacaaagaatatatttttttgttaaaaaccagttgatttaaatatctggtctctctctttggtttttttttggcgggggggtggggggggttcttttttttccgttttgtttttgtttggggggaggggggttttgtttggattctttttgtcgtcattgctggtgactcatgcctttttttaacgggaaaaacaagttcattatattcatattttttatttgtattttcaagactttaaacatttatgtttaaaagtaagaagaaaaataatattcagaactgattcctgaaataatgcaagcttataatgtatcccgataactttgtgatgtttcgggaagatttttttctatagtgaactctgtgggcgtctcccagtattaccctggatgataggaattgactccggcgtgcacacacgtacacacccacacacatctatctatacataatggctgaagccaaacttgtcttgcagatgtagaaattgttgctttgtttctctgataaaactggttttagacaaaaaatagggatgatcactcttagaccatgctaatgttactagagaagaagccttcttttctttcttctatgtgaaacttgaaatgaggaaaagcaattctagtgtaaatcatgcaagcgctctaattcctataaatacgaaactcgagaagattcaatcactgtatagaatggtaaaataccaactcatttcttatatcatattgttaaataaactgtgtgcaacagacaaaaagggtggtccttcttgaattcatgtacatggtattaacacttagtgttcggggttttttgttatgaaaatgctgttttcaacattgtatttggactatgcatgtgttttttccccattgtatataaagtaccgcttaaaattgatataaattactgaggtttttaacatgtattctgttctttaagatccctgtaagaatgtttaaggtttttatttatttatatatattttttgagtctgttctttgtaagacatggttctggttgttcgctcatagcggagaggctggggctgcggttgtggttgtggcggcgtgggtggtggctgggaactgtggcccaggcttagcggccgcccggaggcttttcttcccggagactgaggtgggcgactgaggtgggcggctcagcgttggccccacacattcgaggctcacaggtgattgtcgctcacacagttagggtcgtcagttggtctgaaactgcatttggcccactcctccatcctccctgtccgtcgtagctgccacccccagaggcggcgcttcttcccgtgttcaggcggctccccccccccgtacacgactcccagaatctgaggcagagagtgctccaggctcgcgaggtgctttctgacttccccccaaatcctgccgctgccgcgcagcatgtcccgtgtggcgtttgaggaaatgctgagggacagacaccttggagcaccagctccggtccctgttacagtgagaaaggtcccccacttcgggggatacttgcacttagccacatggtcctgcctcccttggagtccagttccaggctcccttactgagtgggtgagacaagttcacaaaaaccgtaaaactgagaggaggaccatgggcaggggagctgaagttcatcccctaagtctaccacccccagcacccagagaacccactttatccctagtcccccaacaaaggctggtctaggtgggggtgatggtaattttagaaatcacgccccaaatagcttccgtttgggcccttacattcacagataggttttaaatagctgaatacttggtttgggaatctgaattcgaggaacctttctaagaagttggaaaggtccgatctagttttagcacagagctttgaaccttgagttataaaatgcagaataattcaagtaaaaataagaccaccatctggcacccctgaccagcccccattcaccccatcccaggaggggaagcacaggccgggcctccggtggagattgctgccactgctcggcctgctgggttcttaacctccagtgtcctcttcatcttttccacccgtagggaaaccttgagccatgtgttcaaacaagaagtggggctagagcccgagagcagcagctctaagcccacactcagaaagtggcgccctcctggttgtgcagccttttaatgtgggcagtggaggggcctctgtttcaggttatcctggaattcaaaacgttatgtaccaacctcatcctctttggagtctgcatcctgtgcaaccgtcttgggcaatccagatgtcgaaggatgtgaccgagagcatggtctgtggatgctaaccctaagtttgtcgtaaggaaatttctgtaagaaacctggaaagccccaacgctgtgtctcatgctgtatacttaagaggagaagaaaaagtcctatatttgtgatcaaaaagaggaaacttgaaatgtgatggtgtttataataaaagatggtaaaactacttggattcaaa

SEQ ID NO: 70 - DNA, 2245 bp, Homo sapiens
cccgcggctgccgccgccatttcgggcgctgctgtgaagctgaaaccggagccggtccgctgggcggcgggcgccgggggccggaggggcgcgcgcggcggcggcaccccagcgtttaggcgcggaggcagccatggcgggcaacttcgactcggaggagcggagtagctggtactgggggaggttgagtcggcaggaggcggtggcgctgctgcagggccagcggcacggggtgttcctggtgcgggactcgagcaccagccccggggactatgtgctcagcgtctcagagaactcgcgcgtctcccactacatcatcaacagcagcggcccgcgcccgccggtgccaccgtcgcccgcccagcctccgcccggggtgagcccctccagactccgaataggagatcaagagtttgattcattgcctgctttactggaattctacaaaatacactatttggacactacaacgttgatagaaccagtttccagatccaggcagggtagtggagtgattctcaggcaggaggaggcggagtatgtgcgagccctctttgactttaatgggaatgatgaggaagatcttccctttaagaaaggagacatcttgagaatccgggacaagcctgaagagcagtggtggaatgcggaggacagcgaaggcaagagagggatgattccagtcccttacgtcgagaagtatagacctgcctccgcctcagtatcggctctgattggaggtcggtgagctggtaaaggttacgaagattaatgtgagtggtcagtgggaaggggagtgtaatggcaaacgaggtcacttcccattcacacatgtccgtctgctggatcaacagaatcccgatgaggacttcagctgagtatagttcaacagttttgctgacagatgggaacaatcttttttttttttttccaactgccatctatacaattttcttacagatgtcaaaagcagtctagtttatataagcattctgttacctgtgatattttttagactgaactgctccattcctagtcttaattaccatattcagggtacgaactggagggcttgtgtgttagcttctgaattggcaattggaggcggtagtggtcgtgcctgtgtgtatcagaagggataggtatcttgcctcctttctctcaggcagtgcaaatcaccctgtggaaaaccgatggacaggaaggagtgttacacactgcttaccctgatttattcagtggttttgttttcattctggaaccatactatcaaatggcgacagactgttccgttccacccccgtgaagtaatcatgcaccgtgtgaatagtatcaagcaggattgctttcattgtatggagcatgaccagcgtgtgactcattctgacatttcagatcctaagaattctaagaacactactagaagcatttgttccctcctagtcaatgcttcatactttttcttgggattcttttagcccttgacattcttgtcccccaaacctgtaagtaggtgaattcctaagataagtgtgtattttcattccaggtgaaaagcaggatgtaccgagcactttattcagtgcatagctttaagccagtgttggattcactaagtggacagccagtctcccagctctctgccttccccaaaagggtcgtagtaggtcacccttctacagcagctaactagagtcctaactaatgggatccagcagggccatttctccagagggccagtatcctattaggagactcttggaattcttaggttctactcaagagtggaaggaccaatcacctctgatattctgtggaaggttttggggtcaaattctgccctctgcattctgtgcaacttgtataaaagtcaagttagtattacatgaatttggggtagggttagtgctttgaaaaaatgttgaaccggctgggcgcggtggctcacgtctgtaatcccagcactttgggaggccgaggcgggtggatcatgaggtcaggagttcgagaccagcctggccaacatagtgaaaccccatctctgctaaagatataaaaaattagcccggcgtggtggtgcacgcctgtaatcccagctactcgggaggctgaggcaggagaattgcttcaacctgggaggtggaggctgcagtgagccgagatcgcaccactgcgttccagcctgagcgacagggcaagactcagtctcaaaaaaaaaaaaaaggaaaaaaaaaagaaaaaaaaa

SEQ ID NO: 71 - DNA, 3149 bp, Homo sapiens
cctttcccagagtgctctgcgccgtgaagaagcggctcccggggactgggggcattttgtgttggctggagctggagtaacaagatggcgtcgtccgcggagtgacaggggtccctctgggccggagccggcggcagtggtggcagcggtatcgccgccctagctcaccgcgccccttttccagcccgcgacgtcgccgcgcaagcgaggcagcggcggccgccgagaaacaagtggcccagcctggtaaccgccgagaagcccttcacaaactgcggcctggcaaaaagaaacctgactgagcggcggtgatcaggttcccctctgctgattctgggccccgaaccccggtaaaggcctccgtgttccgtttcctgccgccctcctccgtagccttgcctagtgtaggagccccgaggcctccgtcctcttcccagaggtgtcggggcttggccccagcctccatcttcgtctctcaggatggcgagtagcagcggctccaaggctgaattcattgtcggagggaaatataaactggtacggaagatcgggtctggctccttcggggacatctatttggcgatcaacatcaccaacggcgaggaagtggcagtgaagctagaatctcagaaggccaggcatccccagttgctgtacgagagcaagctctataagattcttcaaggtggggttggcatcccccacatacggtggtatggtcaggaaaaagactacaatgtactagtcatggatcttctgggacctagcctcgaagacctcttcaatttctgttcaagaaggttcacaatgaaaactgtacttatgttagctgaccagatgatcagtagaattgaatatgtgcatacaaagaattttatacacagagacattaaaccagataacttcctaatgggtattgggcgtcactgtaataagtgtttagaatctccagtggggaagaggaaaagaagcatgactgttagtacttctcaggacccatctttctcaggattaaaccagttattccttattgattttggtttggccaaaaagtacagagacaacaggacaaggcaacacataccatacagagaagataaaaacctcactggcactgcccgatatgctagcatcaatgcacatcttggtattgagcagagtcgccgagatgacatggaatcattaggatatgttttgatgtattttaatagaaccagcctgccatggcaagggctaaaggctgcaacaaagaaacaaaaatatgaaaagattagtgaaaagaagatgtccacgcctgttgaagttttatgtaaggggtttcctgcagaatttgcgatgtacttaaactattgtcgtgggctacgctttgaggaagccccagattacatgtatctgaggcagctattccgcattcttttcaggaccctgaaccatcaatatgactacacatttgattggacaatgttaaagcagaaagcagcacagcaggcagcctcttccagtgggcagggtcagcaggcccaaacccccacaggcaagcaaactgacaaaaccaagagtaacatgaaaggtttctaagcatgaattgaggaacagaagaagcagagcagatgatcggagcagcatttgtttctccccaaatctagaaattttagttcatatgtacactagccagtggttgtggacaaccatttacttggtgtaaagaacttaatttcagtataaactgactctgggcagcattggtgatgctgtatcctgagttgtagcctctgtaattgtgaatattaactgagatagtgaaacatggtgtccggttttctattgcattttttcaagtggaaaagttaactaaatggttgacacacaaaaattggtggagaaattgtgcatatgccaattttttgttaaaaccttttgttttgaactatactgctttgagatctcatttcagaagaacggcatgaacagtcttcagccacagttgtgatggttgttaaatgctcacaattgtgcattcttagggtttttccatccctggggtttgcaagttgttcacttaaaacattcttaaaatggttggcttcttgtctgcaagccagctgatatggtagcaaccaaagattccagtgtttgagcatatgaaagactctgcctgcttaattgtgctagaaataacagcatctaaagtgaagacttaagaaaaacttagtgactactagattatccttaggactctgcattaactctataatgttcttggtattaaaaaaaaagcatatttgtcacagaaatttagttaacatcttacaactgaacatgtatgtatgttgcttagataaatgtaatcactgtaaacatctatatgatctgggattttgtttttattttgaaatgggagcttttttgtttacaagttcattaaaaactaaaaactgtttctgtaaggaaatgagattttttttaaacaacaaaaaatgccttgctgactcactattaaataaaaatctccccaattttttgatagactacttcaagccatttgttacatggtattcctttgcaagtcaatttaggtttcgtgttataacttttcctctttttttaagaaaaatgaaaaaagtaattcttttgtctgaaggggaaaggcattctttcatttttttctttttttttttttttttttatgacttgcaggcacaatatctagtactgcaactgccagaacttggtattgtagctgctgcccgctgactagcagctggactgattttgaataaaaatgaaagcattaaagggtttccctacaaaacatttttctttaaaatacttttgaaatggctataagcagttgactttcacccttggagagcatcacactgtgtgaggttcagtgattgttgaccctccccagcccctcctgcttctttaagttatctgtgtgcgtgcgcttcctctcaatcttctttgcacgctcatttctttttctctgacccatgagaaaggaaaacttactgatgataatttttaaatagtgtaatttattcatttatagcatgtcaggataaattaaaagaacatttgtctggaaatgctgccgggagcctattgtgtaaatgtaggtattttgtaaaataaccttgaaattg

SEQ ID NO: 72 - DNA, 2422 bp, Homo sapiens
ggtttgtggttggctgaggtggaggaataaaatggcggcgccggcggcgtgaccgggccctctggcccacagccattggtagcggtggcagcagtactgctgccccaactcgctgtgccccctttctcagcccacgacatcgccacgacagcgaggcagcgaccgccaccgagaaagaggtggtggcccagcctggaaccttgagaaaccctcgcaaactgtggcctggcggaaatcctggtgtgctgcagggatcaggctgactccaggccctgtaacaccgggaaacgcctcggtggccatttccagcagccctcatcctcagccttgcgggccggtgggccccggaggcctccatcctcccctagaggggtcagggctgagcccagcctccatctttgcctctcaggatgacaaacaacagcggctccaaagccgaactcgttgtgggagggaaatacaaactggtgcggaagatcgggtctggctcctttggagacgtttatctgggcatcaccaccaccaacggcgaggaagtagcagtgaagctggaatctcagaaggtcaagcacccccagttgctgtatgagagcaaactctacacgattcttcaaggtggggttggcatcccccacatgcactggtatggtcaggaaaaagacaacaatgtgctagtcatggaccttctgggacccagcctcgaagacctctttaatttctgttcaagaaggttcaccatgaaaactgtacttatgttagccgaccagatgatcagcagaattgaatacgtgcatacaaagaattttctacaccgagacattaaaccagataacttcctgatgggtactgggcgtcactgtaataagttgttccttattgattttggtttggccaaaaagtacagagacaacaggaccaggcaacacataccgtacagagaagataaacacctcattggcactgtccgatatgccagcatcaatgcacatcttggtattgagcagagccgccgagatgacatggaatccttaggctacgttttcatgtattttaatagaaccagcctgccgtggcaaggactaaaggctatgacaaaaaaacaaaaatatgaaaagattagtgagaagaagatgtccacccctgttgaagttttatgtaaggggtttcctgcagaattcgccatgtacttgaactactgtcgtgggctgcgctttgaggaagtcccagattacatgtatctgaggcagctattccgcattcttttcaggaccctgaaccaccaatatgactacacatttgattggacgatgttaaagcagaaagcagcacagcaggcagcctcttccagtgggcagggtcagcaggcccaaacccagacaggcaagcaaactgaaaaaaacaagaataatgtgaaagataactaagcgtgaatgaggaacagaagaagcagagcagatgattcgagcagcatttgtttctccccacatctagaaattgtagttcatatgtacaccagctagtggctgtgaacaaccatttagttggtgtaaaaaactttatttcaatataaactgactctggggagcgttggtgatgctgtatcccaaagtgtagcctctgtaattgtgaatattaactgaggtagtgaaacgtgatgtctggttttctattgcatttattcaagtagaaaagttaactaaatggttgacacacacgaattggtggagacattgtccatatgccaattttttgttaaaaccttttattttgaactagactgctttgagatatcatttcagaaggacagtcttcagccacagctgcaaaggttgtaaatgcttatgattgagcatttttagggtttctccatccctggggtttgcaaattgttcacataaagagcattcttaaaatggttggcttcttgtctgtaagccagctgatctagtagtaaccaaaaattccagttttgagaataggaaagattccgcctgcttacctgtgaagacataagaaaatcttagtaactaccagattatctttagaattccacattaactatatcatgttctcggtattttaaaaacaacaacaaccatatttgtcacagaaatttagttaacatcttacaactgaacatgtatgtacatggcttagataaatgtaatcaccgtaaacacctatatgatctgggattttgttcatattttgaaatgggagcttttatgttttacaagttcactaaaatctgaaaactgtttctataaggaaataatacttttttaaacaacaaccaaaaaatgccttgctgattcactaggaaataaaaatctccccaattttttgatagtcaacttcgagccatttgttacatgatattcccttgcaagtaaattttatttcattacaaaaaaaaaaaaaa

SEQ ID NO: 73 - DNA, 2030 bp, Homo sapiens
gcgcgatggcggcggctcctttaggcagctgaaaggggatttaggcccggaagatccgagtccatccgcggcggggagagggcaagcgggaccggtaggggccggagcagcggcggcggcgctcggactgtcccatccgccccgtattgaggcgctgggagcggcggggcgacaggaaagcgatggtgaaagcggggccgtgaggggggcggagccgggagccggacccgcagtagcggcagcagcggcgccgcctcccagagttcagacccaggaagcggccgggagggcaggagcgaatcgggccgccgccgccatggagctgagagtcgggaacaggtaccggctgggccggaagatcggcagcggctccttcggagacatctatctcggtacggacattgctgcaggagaagaggttgccatcaagcttgaatgtgtcaaaaccaaacaccctcagctccacattgagagcaaaatctacaagatgatgcagggaggagtgggcatccccaccatcagatggtgcggggcagagggggactacaacgtcatggtgatggagctgctggggccaagcctggaggacctcttcaacttctgctccaggaaattcagcctcaaaaccgtcctgctgcttgctgaccaaatgatcagtcgcatcgaatacattcattcaaagaacttcatccaccgggatgtgaagccagacaacttcctcatgggcctggggaagaagggcaacctggtgtacatcatcgacttcgggctggccaagaagtaccgggatgcacgcacccaccagcacatcccctatcgtgagaacaagaacctcacggggacggcgcggtacgcctccatcaacacgcaccttggaattgaacaatcccgaagagatgacttggagtctctgggctacgtgctaatgtacttcaacctgggctctctcccctggcaggggctgaaggctgccaccaagagacagaaatacgaaaggattagcgagaagaaaatgtccacccccatcgaagtgttgtgtaaaggctacccttccgaatttgccacatacctgaatttctgccgttccttgcgttttgacgacaagcctgactactcgtacctgcggcagcttttccggaatctgttccatcgccagggcttctcctatgactacgtgttcgactggaacatgctcaaatttggtgccagccgggccgccgatgacgccgagcgggagcgcagggaccgagaggagcggctgagacactcgcggaacccggctacccgcggcctcccttccacagcctccggccgcctgcgggggacgcaggaagtggctccccccacacccctcacccctacctcacacacggctaacacctccccccggcccgtctccggcatggagagagagcggaaagtgagtatgcggctgcaccgcggggcccccgtcaacatctcctcgtccgacctcacaggccgacaagatacctctcgcatgtccacctcacagattcctggtcgggtggcttccagtggtcttcagtctgtcgtgcaccgatgagaactctccttattgctgtgaagggcagacaatgcatggctgatctactctgttaccaatggctttactagtgacacgtcccccggtctaggatcgaaatgttaacaccgggagctctccaggccactcacccagcgacgctcgtgggggaaacatactaaacggacagactccaagagctgccaccgctggggctgcactgcggccccccacgtgaactcggttgtaacggggctgggaagaaaagcagagagagaattgcagagaatcagactccttttccagggcctcagctccctccagtggtggccgccctgtactccctgacgattccactgtaactaccaatcttctacttggttaagacagttttgtatcattttgctaaaaattattggcttaaatctgtgtaaagaaaaaaaaaaaaaaaaaaaaaaaaaaaaaaaaaaaaaaaaaaaaaaaaaaa

SEQ ID NO: 74 - DNA, 2670 bp, Homo sapiens
ggttgggatctgaggggtcctctctgtgcccatcacagtttgagcttcagggaaaagaagaagaggtctttgcccttcgtttttccacgggaggagaatcaagagtgagccatggagctacgtgtggggaacaagtaccgcctgggacggaagatcgggagcgggtccttcggagatatctacctgggtgccaacatcgcctctggtgaggaagtcgccatcaagctggagtgtgtgaagacaaagcacccccagctgcacatcgagagcaagttctacaagatgatgcagggtggcgtggggatcccgtccatcaagtggtgcggagctgagggcgactacaacgtgatggtcatggagctgctggggcctagcctcgaggacctgttcaacttctgttcccgcaaattcagcctcaagacggtgctgctcttggccgaccagatgatcagccgcatcgagtatatccactccaagaacttcatccaccgggacgtcaagcccgacaacttcctcatggggctggggaagaagggcaacctggtctacatcatcgacttcggcctggccaagaagtaccgggacgcccgcacccaccagcacattccctaccgggaaaacaagaacctgaccggcacggcccgctacgcttccatcaacacgcacctgggcattgagcaaagccgtcgagatgacctggagagcctgggctacgtgctcatgtacttcaacctgggctccctgccctggcaggggctcaaagcagccaccaagcgccagaagtatgaacggatcagcgagaagaagatgtcaacgcccatcgaggtcctctgcaaaggctatccctccgaattctcaacatacctcaacttctgccgctccctgcggtttgacgacaagcccgactactcttacctacgtcagctcttccgcaacctcttccaccggcagggcttctcctatgactacgtctttgactggaacatgctgaaattcggtgcagcccggaatcccgaggatgtggaccgggagcggcgagaacacgaacgcgaggagaggatggggcagctacgggggtccgcgacccgagccctgccccctggcccacccacgggggccactgccaaccggctccgcagtgccgccgagcccgtggcttccacgccagcctcccgcatccagccggctggcaatacttctcccagagcgatctcgcgggtcgaccgggagaggaaggtgagtatgaggctgcacaggggtgcgcccgccaacgtctcctcctcagacctcactgggcggcaagaggtctcccggatcccagcctcacagacaagtgtgccatttgaccatctcgggaagtgaggagagcccccattggaccagtgtttgcttagtgtcttcactgtattttctttaaaaaaaaaaaaaaaaaaaaaaaggcaaaaataaaccactcaaaagaacaacaaaaaaacccagcacaaaaccgacgatggagtttgtttctttgatttctttgccaatggcaagaagatgagatgccctcagcactgaggattcttgcccccttgtggtgcccgctgcccccaaccttcaggctgccagatgctcccctgacaacaccaggctacaggagccagacgccagggcctgcccggcctcctgttcctgcccccacccaccacctgcctggagaggaacgggtcgggtccgtgtcggagaagtgacaggtcccagagccaaagccggccctcaagcatcatcagggagtggtgtagtcagttgaaggcagttcccaccgagttttccgagcctcagaatccaggagatacgcacagccccacccactctgagatgacagtggctgacttcccgtgctgggcttttccattgtccccctggcctccaggctcctcctctgcctctccatggagtgggtggggaggtggtgggggccggcgtcccctgcgtgtgtgtgtgtgtgtgtgtgtgtggatgtattgacctgtgtttcccaagacagcaggtgccacggcccgccccgcctgccagcccgaattcccgttctcctgtgtctactaacaaggacatgggggtgggcggtgacctccgcatccctcagagctcagagggtcctcgctgccaccggtccccccctagcccgtcatcagccggtggcagctccatcttccattcctggttttagggcagaatccatggagactgcttccagaaggcatctggctctgagttataaattacttccctggtcctgacagtcacctggggtcccccctctccctggttccacctttctgaggaggagcctggagtcagggctgggttttggattaacccatccttcctagttaacacctttttgtttttattttattttatttttgtttgttttctccgtgtgtgtgttttcctaatttatttacctctgtttcccctttttcctttttttttttaattaaagagcaaagctttttattactttgtaatttaaaaaactgaaaaaaaaaaaactgaagaactttggggggaattttgtacttttttcctgtgtaaatattggacttttttgagctttatcgtggttgttaatttgaagtaataaagtagaaaagataaagtgaaaaaaaaaaaaaaaaaaaaaaaaaaaaa

SEQ ID NO: 75 - DNA, 8163 bp, Homo sapiens
ctgcccaaagtttgtcctattaggcccgccagggtactctgcgactccgggacgagggcggggccgcgctagtggttccggttcggctccagccgcccctcggctcctcgccttccccctcccgtccgccttctcccctccctcccgctcctgggaaagagagaaaccaccgctgcgggtgggtagagaagcacttggcgcctcggggaggggaccgcgcccgcctcatttgcgccttgcagcactgctggaccaggttacaagatgttcacctaagattgagacctagtgactacatttcctacgggaacaaataaatggtttttcatctcccggagatacattacaaacaaatatggtgctaaaagaactccttacctttctctgactacaatttatttggacatacttttgtattgaagagaggtatacatactgaagctacttgctgtactataggagactctgtcctgtaggatcatggaccatcctagtagggaaaaggatgaaagacaacggacaactaaacccatggcacaaaggagtgcacactgctctcgaccatctggctcctcatcgtcctctggggttcttatggtgggacccaacttcagggttggcaagaagataggatgtgggaacttcggagagctcagattaggtaaaaatctctacaccaatgaatatgtagcaatcaaactggaaccaataaaatcacgtgctccacagcttcatttagagtacagattttataaacagcttggcagtgcaggtgaaggtctcccacaggtgtattactttggaccatgtgggaaatataatgccatggtgctggagctccttggccctagcttggaggacttgtttgacctctgtgaccgaacatttactttgaagacggtgttaatgatagccatccagctgctttctcgaatggaatacgtgcactcaaagaacctcatttaccgagatgtcaagccagagaacttcctgattggtcgacaaggcaataagaaagagcatgttatacacattatagactttggactggccaaggaatacattgaccccgaaaccaaaaaacacataccttatagggaacacaaaagtttaactggaactgcaagatatatgtctatcaacacgcatcttggcaaagagcaaagccggagagatgatttggaagccctaggccatatgttcatgtatttccttcgaggcagcctcccctggcaaggactcaaggctgacacattaaaagagagatatcaaaaaattggtgacaccaaaaggaatactcccattgaagctctctgtgagaactttccagaggagatggcaacctaccttcgatatgtcaggcgactggacttctttgaaaaacctgattatgagtatttacggaccctcttcacagacctctttgaaaagaaaggctacacctttgactatgcctatgattgggttgggagacctattcctactccagtagggtcagttcacgtagattctggtgcatctgcaataactcgagaaagccacacacatagggatcggccatcacaacagcagcctcttcgaaatcaggtggttagctcaaccaatggagagctgaatgttgatgatcccacgggagcccactccaatgcaccaatcacagctcatgccgaggtggaggtagtggaggaagctaagtgctgctgtttctttaagaggaaaaggaagaagactgctcagcgccacaagtgaccagtgcctcccaggagtcctcaggccctggggactctgactcaattgtacctgcagctcctgccatttctcattggaagggactcctctttgggggagggtggatatccaaaccaaaaagaagaaaacagatgcccccagaaggggccagtgcgggcagccagggcctagtgggtcattggccatctccgcctgcctaaggctctgagcaggtcccagagctgctgttcctccactgcttgcccatagggctgcctggttgactctccttcccattgtttacagtgaaggtgtcattcacaaaaactcaaggactgctattctccttcttccccttagtttactcctggtttttaccccaccctcaaccctctccagcataaaacctagtgagctaaaggctttgtctgcagaaggagatcaagaggctgggggtaaggccaagaaggtaggaggaaaatggcagacctgggctggagaagaaccttctccgtatcccaggtgtgcctggcagtatggtttcctcttcctctgtgcctgtgcagcattcatcccagctggccttggggttcaggttccttcttccctccctcctgtgaagttacactgtaggacacaagctgtgagcaatctgcagtctactgtccctgtgtgttggcgttcttagcttttttgacaaactcttttctccaggtagtaggacaatgaaaattgttctaagcaaaggaaagaaaactgactttgttgcacttttagtttttttaaaaaaaacaaaaacaaaaacatggcagatgcatattgtgtctggttatattgggggttttacttttacctgttttgagggggatggggccggccaagccattcagagagaacatgggtccagaggacattctcagtggaaagagtttgatctgcagcacccagaagagaagccaaactcggtgtcattctgagtgaacactcaggttggcaagaaaacatacttgaattttcattcatcttctcagcagctgaagaatgtccctaccagagcatcttgacctaatcagcttacagtttgaaaacctagctctccagaacatgagatgagccagccgagccagactgtgaccaggaaacagctcatcccagagaaggagatgcttaacaaaaaaaaattgaaattgtttcccatgctgccagggacttccaactagatagccatgtgacgtcctggtgacttgggggaaaaattagtgatgaaacagccaccaccatattgccattagtggaaaaaaagaggacagtgaacctgccttccacctgccagagggacctcagggtgtggcattatagggccaggaaaagaaaatcggtgtatcctatctgccccaatagctgagctgtagcatttgggctggcctgccttatcagaaaccaagcttatgaagatcttctcccagcaggtccatagcagtaggcttaggatgcagtatatggggccgcatttaaaaggagggaaagattgtttggtgctggaacattccagggaaaaggagactggaatgaaaggtctgaaattatcttctcaattggactccttccagaaaggtggccgtgcctctaagcatgtttttcccagtatgccctaggcctccccccatggtgttttcatatgaggtactactgtgaaggatctggttcctcattcactgtttgacaagtctttcatgtgtggagttactcttctcatgcccaattttcatttgagtttagtggcttaaccaaacaatgactcctcattccagcggtgacagaagagaaagggtcatttacatcaggaaagaggtcttgtatctgggagtagagagctaaccatggagcacagtggctggtgggtgacttagtctgatggtttgtggaccatagaagtcttcacctctggtttgaggtgcagggctgtcttttgtactggagggtgtggggatattttctgatagttgccatttcttgaaaaattcccttgatgtaccttacacagagcagaaataacattaacatggatcagaggtactgggcttcatctgttccattggaccttggctagggaatatcatttcactggcatcaaacctgcttagcttatgaaaagatggtaatatgtcatttctataaatgtttctatatatgaaacataaagtggcagggagatacaatatcacaccccttccccacaaggactgtgaatattgggatttatgtccttgccattacctagtggttacagccctatcactaaaatttacatcgtttctcagttgggatttgggcattgctaacttactgtatagaaagtttaacttttcctcacccctgtatagaaaatgccttgcctctcaagagagggcagagggggggccaggtgcagtggctcacgcctgtaatcccagcagtttgggaggccaaggcaagtggatcatgtgaggtcaagagttcgagaccagcctggccaacatggtgaaaccccgtctctacaaaaaatacaaaaattagctgggcatggtggcatgctcccgtagtcccagctactcgggaggctgaggcaggagaatcacttgagcctgggaggcagaagttgcagtgagccgagatcgcaccactgcactccagcctgggcaacagagtgagactctgtctaaaaagaaaaaaaaaaaagggcagagggaaatggtgggaatgcctggagcatcctggcactctatactctactgagtgcctctcttcagcccctcaccctgcttccacacacacacacacaaaagcaaaggcactgaccagcttggctgcagggcaagctgccttgcagctggatttgcgactttttttttgtcttaaaatttttactggatcagttgtaggggactgtacttcctaagacactgttctcaccttccaacctcacaaatctcttactagatatttggtttttataacaagggtaaagaatcccaggtccctttagcatgcagagtaatggtgatccctccagagccattggcacttcaaagtggtcccagacctgggagattctggtgggatcttccttaaaaataagcaaaaaacctgagtaccctagatgcaattggccatttgtttcaggcccatcagcgaatcagggctccctcctcaaccctactgctacagttccttagctgtatgcctcagccagatccttggggttagggcatgcactcgctgactgtccccacccatccacttgctctgtagtttctgagctttctccatttcacaagtatggtgcctaacgatctttttctttaggattgatgcagttgtttttcctgaaagctaactcagcatctattcataaaaacccttaatagtatacattaggagttttcccaagctctacagtccctcagacattgcatcctaaacagatttgaggcacacaggccaagactccaccaaggcataaatggtcccccctactcccttttgaccagggtatcacttgtgtctctgcagtaagagttggtcaagttgctctacgcaccttggtgctttccagagatctcactccagactgcccccaagggtggatagagtatcctgacagccagtgtgcactcatgactgccttaattaacattcttctgctattatggagcctgtccagcaataaacagggtctaggaaggtacaagattagcttccagttaaaatcccattttatattggaatgcatgagctacagatgacagcagagatcctgaggtttctagacatgttgattgtctcttttttctaaatgaactccaagtacttagaaaacagtccctgtccatcagccagaaaaggtgaccatcacccctaaagtaatttccaaacttagttcagtgggaagatatgctggtagtgcatattcagtgttgattttcagtgctagtaaccacttttaatgccagaaatatgtaacaatgataatgtaacgtcaaagtggttactaaagattatagccttaacttttttatgtaaaagataaaatccattcctcctcccagtgagcaagcatggcttgcatttctcaaaaatgagaacttccatggcagccaagaaaacgtcttctcagaggaactttcgtttgatgcatctcccaagcccacatgcctcctgtgttccagccacctcttccatttcacatttaaaccagctctccattcccattgagttgccctaacaacattgtctccagtgtcagaaccatattaaggttcgtttctcagattgggagcctgcaacaccatacagccaacattgcctttgccacgccactgccaccatccccaccattgccctatggtgggcagatgaattccagaaaccctcagggagccaggataattaggcaacccatctgaattggccacgtaagtgacaggcacttatctctcgggttcttgcttttgcagactccagggaagtcctgtctagaggtcgatggcagagactcctagtctttcccatgaggggttgataggaatcaaattgggattcctttggctttgggttttgtttttttgttgttgtttttggttttcagtttgttttttggtgtatggggggtgattttgtttctgaataagaaaaagaagaggcaaccatggcccttatgtgggtttatcctttttgagcaatgttttagccacaagtaaggaatcttgaaagtcttttgtccagcaagcagtcttaaaaatgtttttcctaactccttttgcaggtgactaagtacaaaaaaatagttttctcattgtattcaaaatagtgagtaggttccctggataatacacagtggtagttgacatattttctcaaaacacaaccagaaaacccacttccggtatttgtaaatcacctttcaagggaaaaagtgaacacgtattccttgtatttctagtttgattaccaaacctgatgttacaaagaaacctccgttctgtagacagaatttcttttatttttcttcttttactcctcacaatcactttcccagtgccatcaccatctataaggtctcagagcagaggattattcatggtaataagtgggggtgtggtgcagccattccagtaacacccacaagaggacagctgttctgaatgtccccacccacccctctttcagtacaggtgagacattttcagttcatgagctccagaccaaatcccaggccagcccttgcaccaaaagccttttttagaaggcttatcagtctattaggaatgtctcaggaaagatgagccatttctttggggagaaatatatttacagatggaagtgtgtgactgcgtgtctgtgtgtgtgtgtggtgtgtgtgcgcacgtgagtgcgtgtgttcatctatgtgcatttcacttccataaagacccagcccaagctgctgggaaccatgtgttcctgagtattctcagaggttaaacaagtgacaagtgagcttctgaaattagtgtctcagcaagctggctttaggaatgagccccattttatcaagcagagaaaaaaaataacagcagaaaagataaagataaaccaaaaatatataccccccaatggaaaataatgttgattcagcaattcccataggatgtattacatgctctaatttattatattattatttatctgtctttgatctttgcccattgtactcttaaaaagatgttgggatgttgattgcgatttttaaacaactagataatgtataaatcagcagtggaaatcagttttaatgtgtggatgtgtctgattattgttaaatgcctctttttttactttttttttttttagatgtataatgtttcataaaccctggcactggtcacaaagctcagctgtgaaaatgaaatttgtagtatttttaaacatgaatgtcaatttcaagtgtatttgaaatggttcctccaggagagatatttgtgcaccattaggaaaatcttctctgcagaggaagtagccttctttggagaaaatggaaaatgggttctgatatgtgatctcagagtagcccatttcctagggcaccatggaaaacacaaatgtgatctttaagtatacctcttccccagtttggggaggaaaggactcagtttgcaccctttttgtatgtaaaataaaatgtcttacctttcttggctacttctgcttgtttggttggttgattggtttgtctgtttttaatctccctcggctcatttgtaattaacaatctagctaggactaactttgatgcgattcaagactcctgtgaacaaaaataatttggcattcttgtttcattccttggattaaatattgtcttctcctgtgagtcacttcaaaaataaatactgctgtctctcttcgagtgctgaa

SEQ ID NO: 76 - DNA, 2921 bp, Homo sapiens
ccccgctggcagacgctggcggcgtaaggcgcgcgggccccggagcgggcgcggcggagcgcggcgagcccggcgcctcccgtcccgaacatgcggaggccggcccaggcggcgcgggagccggagcgggggcccaagcgggcaccggagccggagcgcgagggggcgcggggcccggagcgggggtccgcgctgcgctgctgaggccgggccggccgcccagacgctgcccgcgggcccggccacggcggagccaagctgtgagccgtgagctttgaggcggtgggatgtgtcagcagaatgtctcctgcccccgagagcgaccccgaggccactgagaagagcagcgcggcctggccggcccgaacgcctgcgtctcagtagctgggagccacgggcccacgcccgcccaccggccgcagtgatgttctagccacagaggagccaagacctcaggtttccagagacttgggatttgcacggcagcagagtcaccgtggagaggccagggtatcacaaacttatggattttgacaagaaaggagggaaaggggagacggaggagggccggagaatgtccaaggccggcgggggccggagcagccacggcatccggagctcggggaccagctcgggggtcctgatggtgggccccaacttccgcgtcggcaagaagatcggctgcggcaacttcggggagctccgcctaggaaagaatctctatacaaatgaatacgtggctatcaaattggagccgatcaagtcccgggccccgcagctgcacctggagtaccggttctacaagcagctcagcgccacagagggcgtccctcaggtctactacttcggtccgtgcgggaagtacaacgccatggtgctggagctgctggggcccagcctggaggacctgttcgacctgtgcgaccggaccttcacgctcaagacggtgctgatgatcgccatccagctgatcacgcgcatggagtatgtgcacaccaagagcctaatctaccgggacgtgaagcccgagaacttcctggtgggccgcccggggaccaagcggcagcatgccatccacatcatcgacttcgggctggccaaggagtacatcgaccccgagaccaagaagcacatcccgtaccgcgagcacaagagcctgacgggcacggcgcgctacatgagcatcaacacgcacctgggcaaggagcagagccgccgcgacgacctggaggcgctgggccacatgttcatgtacttcctgcgcggcagcctcccctggcaggggctcaaggccgacacgctcaaggagcggtaccagaagatcggggacaccaaacgcgccacgcccatcgaggtgctctgcgagaacttcccagaggagatggccacgtacctgcgctatgtgcggcgcctggacttcttcgagaagcccgactatgactacctgcggaagctcttcaccgacctcttcgaccgcagtggcttcgtgttcgactatgagtacgactgggccgggaagcccctgccgacccccatcggcaccgtccacaccgacctgccctcccagcctcagctccgggacaaaacccagccgcacagcaaaaaccaggcgttgaactccaccaacggggagctgaatgcggacgaccccacggccggccactccaacgccccgatcacagcgcctgcagaggtggaggtggccgatgaaaccaaatgctgctgtttcttcaagaggagaaagagaaaatcgctgcagcgacacaagtgaccctgggcgcgtgcagccccctgaatcttctccgtgcagccccttggggcgcgaccttgtgcgaggccctcggggcccacccacagcggcccagggccagaccctggctggaagccagaacgcagactgcaggggccgcgcctggctcaggcggccccacccccgggacgtggggtcacttccttcatgtaagactttggccgaaatttctacacctgtgtctagtcctcccctccaagagcattaactatttaaaacaaggaaaagaggaaaaaaaaaacagaggcccgccctaccccactcctgcccctccgtttctttgctgaagtgagtagtgtgatcctggaggccccccggcctggccccgccccgccagccgcccccgttagcgtcataaagtccagcttgtctccctcgatccaaaggccgttttctcgaggggagggcaggcccggcctggaggggtgctgtggagctgtcttgcccaggccctcctgggagggggacaggcattgttgccaggggtgaggccgtgccccaggcctccccgaaaccaaaggggaaggcaggggtggggccgtggctgaagccggctccccaaccaaaatgctgcaccaaagctcgggcgccgcgggcacggctgctgcagtctcttcccagcctggccctggcaaggggcgggtgggcgctgccaggcgggtgcttctcgacgcacttgctcccggaggctgcgccccggcgcctggaacccgaggtgggaggaccggttggtgtcaccctgctcggccctcagccctgccgcgtggggcgcgtgggcacggagcttcctgcctctctgctccgacacccggcaagcagccggagacaaaacgccttaaagcccccggcccagccctgcaggtatattgcaggggcctgggggcggccctggactggcgggcggttccccagtggggtgccctggaggctgccgggcagagtggagcagcttggggccgtgcccagggcggtggctgtgagtctagtttttgctttaccaagtgtacagaaatggcatttacgtttctctgatgctcccttgaagccatagaatttaggggcttttttaaaaaaataaaagaaaaatgaaaccaaaaaaaaaaaaaaaaaa

SEQ ID NO: 77 - DNA, 4366 bp, Homo sapiens
actcggctgttttcgctgatgcgggcagcttgggggccgccgccgctaaacagacgctttcctttttaattttttttccatgtgttcacttccgggtccggcgtcgatccggatgcccgaggcagaaggatgtttgacctccggataagcgaggcgctgctgtgcattcattccgggctgcatcggtggcgacagcagaggctcgggcggcgactctccggccagcggcggcggtaggaggcaccagcggcagtgcagggaccgaatccgagcagcgctgcgttacctctctctctcgctccttcccccctacctcgctcgctcgctcgctcgctccctgcgtggctcgctttcctcctccggccgccggcgggtgtgatgtgccgccgccgctgcccccgccggcgctgacggactgggggcgccgcccgcgcccgggaccgacccctctgctcgcggccgcgcctttgagctctctatcaatatcagctcacatcattgaaaagataattttgaagacatgttttgctgaaaagacactaagaaaaattttacgaatgggatgaacatgctccagttaattgactacctactgcaatttgaatgttaacattacccatctggtacagttacctagtgatgtacctattttcacaataccctgtttcagtgtgcttgtcttgattaaagaattcaaagtggagtaccgcaaacttgatatggaaaataaaaagaaagacaaggacaaatcagatgatagaatggcacgacctagtggtcgatcgggacacaacactcgaggaactgggtcttcatcgtctggagttttaatggttggacctaactttagagttggaaaaaaaattggatgtggcaattttggagaattacgattagggaaaaatttatacacaaatgaatatgtggcaattaagttggagcccatgaaatcaagagcaccacagctacatttggaatacagattctataagcagttaggatctggagatggtatacctcaagtttactatttcggcccttgtggtaaatacaatgctatggtgctggaactgctgggacctagtttggaagacttgtttgacttgtgtgacagaacattttctcttaaaacagttctcatgatagctatacaactgatttctcgcatggaatatgtccattcaaagaacttgatatacagagatgtaaaacctgagaacttcttaataggacgaccaggaaacaaaacccagcaagttattcacattatagattttggtttggcaaaggaatatattgatccggagacaaagaaacacataccatacagagaacacaagagccttacaggaacagctagatatatgagcataaacacacatttaggaaaagaacaaagtagaagagacgatttagaagctttaggtcatatgttcatgtattttctgagaggcagtcttccttggcaaggcttaaaggctgacacattaaaggagaggtatcagaaaattggagatacaaaacgggctacaccaatagaagtgttatgtgaaaattttccagaaatggcaacatatcttcgttatgtaagaaggctagatttttttgaaaaaccagactatgactacttaagaaagctttttactgacttgtttgatcgaaaaggatatatgtttgattatgaatatgactggattggtaaacagttgcctactccagtgggtgcagttcagcaagatcctgctctgtcatcaaacagagaagcacatcaacacagagataagatgcaacaatccaaaaaccaggttgtaagttctacaaatggagagttaaacacagatgaccccaccgcaggacgttcaaatgcacccatcacagcccctactgaagtagaagtgatggatgaaaccaactgccagaaagtgttgaacatgtggtgctgctgttttttcaaacgaaggaaaaggaaaaccatacagcgccacaaatgactctggacacagacagatcctggggagttacttacatgttcatctgctgtcttgtgattaaaatcatctctgtagtgaccacgtatattttcaaggactcactcttagaaacaaaaatgtcatactttcatacttcattttgtggttgtcttacattctttttctttttttttttttctctaatttaacctttatggaagctttaaagttttgtcaaaacatgagtgctttgcccatcagtgaatggaatggaccaatgaggtggtatcaatgaatatagttccatagaacattttccagaagttcttctgttgtagaaagcagtacagtatcttaagtgtcaaccagttatatacctaatctggttttttataacttctgtaagagcataatcaaacaggaattttcttttctcagtggataatacaacagagaaaacagagttgcccaaatatttaaaagaagttattccttgagaagttcatattttgtgacatctgcattgatttcagtattactgatggtactgttattcataagtcatattaacattctctccgtgaaatcatggtacagtcactgcccagaggtactgaggaaaaagcaatatgggttcggcagatggtggtggtaaaatgaatcttaaggagtgtggtaaatatgtgctccgcttttgttgcatcactatgtgaagtactgtgttgcagaagtggcaaaagcgcttatttttaaaaatgcaaaatatttgtacaatgtaactttatgcttccaaataataatgtatgttagacagcaagaaatgaatactttaaaaagtgatgtatgttggagttataaagaaatacactaaggagaggtagtaaatgtgaaccttgttgcagtgtataaggtggaagcctaaagaaatctcaccgaaacttactgctgaatgattacattctcccttaagcagaaaactttggatgtgccatgcaatggtgtctgtgtaattattttgctctttgattaaaaaaaagacccccagcaataaaaagtgggtcactctatgccctctgtgcacattagtctcttgtattcaactttgctgattctctggaattttcctactctttagcataattttgatgattgaaaaatattttggaaaggatgggtcaggtgctttgcctccatagtcttttgaagtgcctgcatatgaacaacaacaacaacaacaaaaaattctgtaaaaaaggaagcccattccacttttcaagtatgctttgttttaagccataaagacacacatgtagttttgtcacattctactagccaaaattttcaagaagggttaaaacaaagactggctagaaagataattattttgaataaatctcatattcatctttcatttatataattgttacttattcctcccatgcagtctcttcgttgtctttaagtgtgtgcctccaggcatgcttatttatttttattgtctcaaggtaacatttaagatgtatattaaagtaaagctacatttttttacttcattattgcatttacagggatttaattgtactttgtaatttatttttcttattagccaaaagtttaatgcatttttttttgatgaattaggcacccacatgaacaccacaaatcaggacattgtttatcattgttgctatgaatcctatgaatgatcttttttttattttaaagacctacacttaacctacaaaacatttgctgtataatttggtcaacagtttctatctatctgtatactgtcatgatgtcttaaactgcaggagttacatactgagtttatatttttatttgctttgagcaaggtagataaacattttggccattataatgtgaaaccacttcttctttctttacagtatttgaccaaacttgtgtgtctatgatatttgtaaatacatgcgaatatctgtatttcttatcataagcctatttagttttattctcagtagggttttttggattgtacagtgtttatatgatctgaactccttatacataagaaggtgtgtatattaatccaattatggacttaaaatattttaaaagtataaatacccttatttgctgcaaagaccagtgtgtaggcatttgctttttagcaatatttttaagtgctccattttaatgccgaggaataagtcttttggcaacacaaactggtcaataataggtaatgcaggtatgttcaggttaagccaacaatgttttgcatttttatgcttattttctgtcaacactaatgaagtcaacattgcctgaatgtctgaataatgaaacacatccctgtttaaaagtatgtaactgaaaaagaaataaaaaaaaataaaagtagtttttttaaa

SEQ ID NO: 78 - DNA, 2849 bp, Homo sapiens
cccgcctcctggtaggagggggtttccgcttccggcagcagcggctgcagcctcgctctggtccctgcggctggcggccgagccgtgtgtctcctcctccatcgccgccatattgtctgtgtgagcagaggggagagcggccgccgccgctgccgcttccaccacagctctatcaaggcttgtcaagcagtgtgctcatcacatggtaaatcatgcagcgtggaacctcataaaatctccaagaaacatcattcacccatactgactagtttcacatctctttgtttgaagaaaacaggtctgaaacaaggtcttacccccagctgcttctgaacacagtgactgccagatctccaaacatcaagtccagctttgtccgccaacctgtctgacatgtcgggacccgtgccaagcagggccagagtttacacagatgttaatacacacagacctcgagaatactgggattacgagtcacatgtggtggaatggggaaatcaagatgactaccagctggttcgaaaattaggccgaggtaaatacagtgaagtatttgaagccatcaacatcacaaataatgaaaaagttgttgttaaaattctcaagccagtaaaaaagaagaaaattaagcgtgaaataaagattttggagaatttgagaggaggtcccaacatcatcacactggcagacattgtaaaagaccctgtgtcacgaacccccgccttggtttttgaacacgtaaacaacacagacttcaagcaattgtaccagacgttaacagactatgatattcgattttacatgtatgagattctgaaggccctggattattgtcacagcatgggaattatgcacagagatgtcaagccccataatgtcatgattgatcatgagcacagaaagctacgactaatagactggggtttggctgagttttatcatcctggccaagaatataatgtccgagttgcttcccgatacttcaaaggtcctgagctacttgtagactatcagatgtacgattatagtttggatatgtggagtttgggttgtatgctggcaagtatgatctttcggaaggagccatttttccatggacatgacaattatgatcagttggtgaggatagccaaggttctggggacagaagatttatatgactatattgacaaatacaacattgaattagatccacgtttcaatgatatcttgggcagacactctcgaaagcgatgggaacgctttgtccacagtgaaaatcagcaccttgtcagccctgaggccttggatttcctggacaaactgctgcgatatgaccaccagtcacggcttactgcaagagaggcaatggagcacccctatttctacactgttgtgaaggaccaggctcgaatgggttcatctagcatgccagggggcagtacgcccgtcagcagcgccaatatgatgtcagggatttcttcagtgccaaccccttcaccccttggacctctggcaggctcaccagtgattgctgctgccaacccccttgggatgcctgttccagctgccgctggcgctcagcagtaacggccctatctgtctcctgatgcctgagcagaggtgggggagtccaccctctccttgatgcagcttgcgcctggcggggaggggtgaaacacttcagaagcaccgtgtctgaaccgttgcttgtggatttatagtagttcagtcataaaaaaaaaattataataggctgattttcttttttctttttttttttaactcgaacttttcataactcaggggattccctgaaaaattacctgcaggtggaatatttcatggacaaatttttttttctcccctcccaaatttagttcctcatcacaaaagaacaaagataaaccagcctcaatcccggctgctgcatttaggtggagacttcttcccattcccaccattgttcctccaccgtcccacactttagggggttggtatctcgtgctcttctccagagattacaaaaatgtagcttctcaggggaggcaggaagaaaggaaggaaggaaagaaggaagggaggacccaatctataggagcagtggactgcttgctggtcgcttacatcactttactccataagcgcttcagtggggttatcctagtggctcttgtggaagtgtgtcttagttacatcaagatgttgaaaatctacccaaaatgcagacagatactaaaaacttctgttcagtaagaatcatgtcttactgatctaaccctaaatccaactcatttatacttttatttttagttcagtttaaaatgttgataccttccctcccaggctccttaccttggtcttttccctgttcatctcccaacatgctgtgctccatagctggtaggagagggaaggcaaaatctttcttagttttctttgtcttggccattttgaattcatttagttactgggcataacttactgctttttacaaaagaaacaaacattgtctgtacaggtttcatgctagagctaatgggagatgtggccacactgacttccattttaagctttctaccttcttttcctccgaccgtccccttccctcacatgccatccagtgagaagacctgctcctcagtcttgtaaatgtatcttgagaggtaggagcagagccactatctccattgaagctgaaatggtagacctgtaattgtgggaaaactataaactctcttgttacagccccgccaccccttgctgtgtgtatatatataatactttgtccttcatatgtgaaagatccagtgttggaattctttggtgtaaataaacgtttggttttatttatcaaaaaaaaaaaaaaa

SEQ ID NO: 79 - DNA, 1674 bp, Homo sapiens
gcggccgcccgccgccgcgctcctcctcctcctcctccagcgcccggcggcccgctgcctcctccgcccgacgccccgcgtcccccgccgcgccgccgccgccaccctctgcgccccgcgccgccccccggtcccgcccgccatgcccggcccggccgcgggcagcagggcccgggtctacgccgaggtgaacagtctgaggagccgcgagtactgggactacgaggctcacgtcccgagctggggtaatcaagatgattaccaactggttcgaaaacttggtcggggaaaatatagtgaagtatttgaggccattaatatcaccaacaatgagagagtggttgtaaaaatcctgaagccagtgaagaaaaagaagataaaacgagaggttaagattctggagaaccttcgtggtggaacaaatatcattaagctgattgacactgtaaaggaccccgtgtcaaagacaccagctttggtatttgaatatatcaataatacagattttaagcaactctaccagatcctgacagactttgatatccggttttatatgtatgaactacttaaagctctggattactgccacagcaagggaatcatgcacagggatgtgaaacctcacaatgtcatgatagatcaccaacagaaaaagctgcgactgatagattggggtctggcagaattctatcatcctgctcaggagtacaatgttcgtgtagcctcaaggtacttcaagggaccagagctcctcgtggactatcagatgtatgattatagcttggacatgtggagtttgggctgtatgttagcaagcatgatctttcgaagggaaccattcttccatggacaggacaactatgaccagcttgttcgcattgccaaggttctgggtacagaagaactgtatgggtatctgaagaagtatcacatagacctagatccacacttcaacgatatcctgggacaacattcacggaaacgctgggaaaactttatccatagtgagaacagacaccttgtcagccctgaggccctagatcttctggacaaacttctgcgatacgaccatcaacagagactgactgccaaagaggccatggagcacccatacttctaccctgtggtgaaggagcagtcccagccttgtgcagacaatgctgtgctttccagtggtctcacggcagcacgatgaagactggaaagcgacgggtctgttgcggttctcccacttttccataagcagaacaagaaccaaatcaaacgtcttaacgcgtatagagagatcacgttccgtgagcagacacaaaacggtggcaggtttggcgagcacgaactagaccaagcgaagggcagcccaccaccgtatatcaaacctcacttccgaatgtaaaaggctcacttgcctttggcttcctgttgacttcttcccgacccagaaagcatggggaatgtgaagggtatgcagaatgttgttggttactgttgctccccgagcccctcaactcgtcccgtggccgcctgtttttccagcaaaccacgctaactagctgaccacagactccacagtggggggacgggcgcagtatgtggcatggcggcagttacatattattattttaaaagtatatattattgaataaaaggttttaaaagaaaaaaaaaaaaaaaaaa

SEQ ID NO: 80 - DNA, 1128 bp, Homo sapiens
gcttctcgttgtgccccgcccgcaagcgccctcctccgggccttcgtgacagccaggtcgtgcgcgggtcatcctgggattggtagttcgctttctctcatttagccagtttctttctctaccggggactccgtgtcccggcatccaccgcggcacctgacccttggcgcttgcgtgttgccctcttccccaccctccctaatttccactccccccaccccacttcgcctgccgcggtcgggtccgcggcctgcgctgtagcggtcgccgccgttccctggaagtagcaacttccctaccccaccccagtcctggtccccgtccagccgctgacgtgaagatgagcagctcagaggaggtgtcctggatttcctggttctgtgggctccgtggcaatgaattcttctgtgaagtggatgaagactacatccaggacaaatttaatcttactggactcaatgagcaggtccctcactaccgacaagctctagacatgatcttggacctggagcctgatgaagaactggaagacaaccccaaccagagtgacctgattgagcaggcagccgagatgctttatggattgatccacgcccgctacatccttaccaaccgtggcatcgcccagatgttggaaaagtaccagcaaggagactttggttactgtcctcgtgtgtactgtgagaaccagccaatgcttcccattggcctttcagacatcccaggtgaagccatggtgaagctctactgccccaagtgcatggatgtgtacacacccaagtcatcaagacaccatcacacggatggcgcctacttcggcactggtttccctcacatgctcttcatggtgcatcccgagtaccggcccaagagacctgccaaccagtttgtgcccaggctctacggtttcaagatccatccgatggcctaccagctgcagctccaagccgccagcaacttcaagagcccagtcaagacgattcgctgattccctcccccacctgtcctgcagtctttgacttttcctttcttttttgccaccctttcaggaaccctgtatggtttttagtttaaattaaaggagtcgttattgtggtgggaatatgaaataaagtagaagaaaaggcc

SEQ ID NO: 81 - DNA, 2288 bp, Homo sapiens
tcgtcggagcgcggctcagcggcgcggcggagactcggcacggcggcggccaggcgcaggcgggcgggcggagcagcggacggcgccgaggccgccccacgcgccgggctcgcggcggcgcagcgcgccggagtggtcggggcccgcggccgctcgcgcctctcgatgggcagctcgcacttgctcaacaagggcctgccgcttggcgtccgacctccgatcatgaacgggcccctgcacccgcggcccctggtggcattgctggatggccgggactgcacagtggagatgcccatcctgaaggacgtggccactgtggccttctgcgacgcgcagtccacgcaggagatccatgagaaggtcctgaacgaggctgtgggggccctgatgtaccacaccatcactctcaccagggaggacctggagaagttcaaagccctccgcatcatcgtccggattggcagtggttttgacaacatcgacatcaagtcggccggggatttaggcattgccgtctgcaacgtgcccgcggcgtctgtggaggagacggccgactcgacgctgtgccacatcctgaacctgtaccggcgggccacctggctgcaccaggcgctgcgggagggcacacgagtccagagcgtcgagcagatccgcgaggtggcgtccggcgctgccaggatccgcggggagaccttgggcatcatcggacttggtcgcgtggggcaggcagtggcgctgcgggccaaggccttcggcttcaacgtgctcttctacgacccttacttgtcggatggcgtggagcgggcgctggggctgcagcgtgtcagcaccctgcaggacctgctcttccacagcgactgcgtgaccctgcactgcggcctcaacgagcacaaccaccacctcatcaacgacttcaccgtcaagcagatgagacaaggggccttcctggtgaacacagcccggggtggcctggtggatgagaaggcgctggcccaggccctgaaggagggccggatccgcggcgcggccctggatgtgcacgagtcggaacccttcagctttagccagggccctctgaaggatgcacccaacctcatctgcaccccccatgctgcatggtacagcgagcaggcatccatcgagatgcgagaggaggcggcacgggagatccgcagagccatcacaggccggatcccagacagcctgaagaactgtgtcaacaaggaccatctgacagccgccacccactgggccagcatggaccccgccgtcgtgcaccctgagctcaatggggctgcctataggtaccctccgggcgtggtgggcgtggcccccactggcatcccagctgctgtggaaggtatcgtccccagcgccatgtccctgtcccacggcctgccccctgtggcccacccgccccacgccccttctcctggccaaaccgtcaagcccgaggcggatagagaccacgccagtgaccagttgtagcccgggaggagctctccagcctcggcgcctgggcagagggcccggaaaccctcggaccagagtgtgtggaggaggcatctgtgtggtggccctggcactgcagagactggtccgggctgtcaggaggcgggagggggcagcgctgggcctcgtgtcgcttgtcgtcgtccgtcctgtgggcgctctgccctgtgtccttcgcgttcctcgttaagcagaagaagtcagtagttattctcccatgaacgttcttgtctgtgtacagtttttagaacattacaaaggatctgtttgcttagctgtcaacaaaaagaaaacctgaaggagcatttggaagtcaatttgaggtttttttttttgttttttttttttttgtatgttggaacgtgccccagaatgaggcagttggcaaacttctcaggacaatgaatccttcccgtttttctttttatgccacacagtgcattgttttttctacctgcttgtcttatttttagaataatttagaaaaacaaaacaaaggctgtttttcctaattttggcatgaacccccccttgttccaaatgaagacggcatcacgaagcagctccaaaaggaaaagcttgggcggtgcccagcgtgcccgctgcccatcgacgtctgtcctggggacgtggagggtggcagcgtccccgcctgcaccagtgccgtcctgctgatgtggtaggctagcaatattttggttaaaatcatgtttgtgactgtaaccatttgtatgaattattttaaagaaataaaaatcctggaaagagccagcgtg

SEQ ID NO: 82 - DNA, 3441 bp, Homo sapiens
gaggagtgagcgagcggcgaccctcacctcgcctcccgcctagctcctgcgcagccagcgggtaccgggagctgcggccagcgccgcttctttcctttccttttctctccgttttccttctccttccccggaggagaaaacaaataaagaagagcaaatagccgggaggcgctcggcatccaggacgttccctcccccgatccaagttggaattagcatcctctcggggggtttcatcaccttaaatggttttgaaccaatgaaggtgtattcccttaaaaagacggacagcccatcgtgtgaactatagagtttgtggacagatttatattgggttcatagtggcgtcatgcacgcagactcctgcaagttcccctaagttcttagaggactgctttgccttttgatctgagagttgcaaagttccataaagaatggcccttgtggataagcacaaagtcaagagacagcgattggacagaatttgtgaaggtatccgcccccagatcatgaacggccccctgcacccccgccccctggtggcgctgctggacggccgcgactgcactgtggagatgcccatcctgaaggacctggccactgtggccttctgtgacgcgcagtcgacgcaggaaatccacgagaaggttctaaacgaagccgtgggcgccatgatgtaccacaccatcaccctcaccagggaggacctggagaagttcaaggccctgagagtgatcgtgcggataggcagtggctatgacaacgtggacatcaaggctgccggcgagctcggaattgccgtgtgcaacatcccgtctgcagccgtggaagagacagcggactctaccatctgccacatcctcaacctgtaccggaggaacacgtggctgtaccaggcactgcgggaaggcacgcgggttcagagcgtggagcagatccgcgaggtggcctcgggagcggcccgcatccgtggggagacgctgggcctcattggctttggtcgcacggggcaggcggttgcagttcgagccaaggcctttggattcagcgtcatattttatgacccctacttgcaggatgggatcgagcggtccctgggcgtgcagagggtctacaccctgcaggatttgctgtatcagagcgactgcgtctccttgcactgcaatctcaacgaacataaccaccacctcatcaatgactttaccataaagcagatgaggcagggagcattccttgtgaacgcagcccgtggcggcctggtggacgagaaagccttagcacaagccctcaaggagggcaggatacgaggggcagccctcgacgtgcatgagtcagagcccttcagctttgctcagggtccgttgaaagatgccccgaatctcatctgcactcctcacactgcctggtacagtgagcaggcgtcactggagatgagggaggcagctgccaccgagatccgccgagccatcacaggtcgcatcccagaaagcttaagaaattgtgtgaacaaggaattctttgtcacatcagcgccttggtcagtaatagaccagcaagcaattcatcctgagctcaatggtgccacatacagatatccgccaggcatcgtgggtgtggctccaggaggacttcctgcagccatggaagggatcatccctggaggcatcccagtgactcacaacctcccgacagtggcacatccttcccaagcgccctctcccaaccagcccacaaaacacggggacaatcgagagcaccccaacgagcaatagcagagaatgccagaaggtaatcactcagatacacttgggaccaagagacagtgaaaaatagatgaactaagagaaaaagaatcggatggtctttgtaactgattctggacatatgcatcattgatgttgcagtgttgaaactacaagagctagaaaactgaagatgtcgtctgcttacggaagcgctgaaagactaggatgtgatttattaacgaccaacttctgttattgtgtgttaagtttttcatctgtgcatcaaatcacaaaaagaataaatagagctttttcctttatcagtcccttgggcacagcaggtcctgaacaccctgctctacaatgttgcatcaagagttcaaacaacaaaataaaaaatattaagaggaaatccccatcctgtgacttgagtcccttaagtctacaggggctggtgacctctttttgctaataggaaaatcacattactacaaaatggggagaaaactgtttgcctgtggtagacacctgcacgcataggattgaagacagtacaggctgctgtacagagaagcgcctctcacatctgaactgcatactgagcgggcaagtcggttgtaagttcagtaaaaccctctgatgatgcaaaaaaaaaaaaaaaagtattaagtttcacaagctgtttgtactcaaatatattttctcagtttcagatcctctgctattttattgagtggaaagtcttgagctaaaagggttcaagaagaataatgttgcatttccttatgtctcaggaaacactttttatggtaacttgtcagattgtctatgaacaaacccacttttttagacattgataaagtcttcttttcttcacgtgatattttatacaagaacacttcagatgtattagatgtgactgattttaacaaatcctattagatttgtatcaactagttacatgttctattcatagtcttttgtgaatcattgcctttttgtttaaaaagatggcctattttgagcctttgtataggtacattcctgtttttgtgacaaaagaaaaactttaaaattgtcccaaacagaaaaataatggctatcagaagtatgttttgttttagtgtgagttaccgttactgtatttgtttattgtaaaggtggacatttagcgttcagtgcagttttcaataaaaagtaattaaaatttgttaagttctgaaattcaagtacatctcactaatgtaaatgttctctacttgagatgtttaaggcaattgcattgtcaattagccaatttccagctcttgttactacagggttccataaccagactcaagaccgctgacaattaattacctgtgataacaaaaagtttaattgaaaaatcaaaacctcacacaagtccatcattatcacgtcatgccatccttaagatgcaatggtgggttagtgctaaatcaattcaaaaaaaaacaaagttgctcaacttttagagttctgactttaatctaccccaaagcaaaatgacctggacctggttcaagggagggaagtgaaccttgaaactgttttgccaataacctaacaaacaaaatgatatttacaaagaagtgttgcaaatagtcccatgagttaagagcttgatttaatggatcttctttttaaatagaattaaacctttatactaaaagta

SEQ ID NO: 83 - DNA, 3415 bp, Homo sapiens
aggatacagcggcttctgcgcgacttataagagctccttgtgcggcgccattttaagcctctcggtctgtggcagcagcgttggcccggccccgggagcggagagcgaggggaggcggagacggaggaaggtctgaggagcagcttcagtccccgccgagccgccaccgcaggtcgaggacggtcggactcccgcggcgggaggagcctgttcccctgagggtatttgaagtataccatacaactgttttgaaaatccagcgtggacaatggctactcaagctgatttgatggagttggacatggccatggaaccagacagaaaagcggctgttagtcactggcagcaacagtcttacctggactctggaatccattctggtgccactaccacagctccttctctgagtggtaaaggcaatcctgaggaagaggatgtggatacctcccaagtcctgtatgagtgggaacagggattttctcagtccttcactcaagaacaagtagctgatattgatggacagtatgcaatgactcgagctcagagggtacgagctgctatgttccctgagacattagatgagggcatgcagatcccatctacacagtttgatgctgctcatcccactaatgtccagcgtttggctgaaccatcacagatgctgaaacatgcagttgtaaacttgattaactatcaagatgatgcagaacttgccacacgtgcaatccctgaactgacaaaactgctaaatgacgaggaccaggtggtggttaataaggctgcagttatggtccatcagctttctaaaaaggaagcttccagacacgctatcatgcgttctcctcagatggtgtctgctattgtacgtaccatgcagaatacaaatgatgtagaaacagctcgttgtaccgctgggaccttgcataacctttcccatcatcgtgagggcttactggccatctttaagtctggaggcattcctgccctggtgaaaatgcttggttcaccagtggattctgtgttgttttatgccattacaactctccacaaccttttattacatcaagaaggagctaaaatggcagtgcgtttagctggtgggctgcagaaaatggttgccttgctcaacaaaacaaatgttaaattcttggctattacgacagactgccttcaaattttagcttatggcaaccaagaaagcaagctcatcatactggctagtggtggaccccaagctttagtaaatataatgaggacctatacttacgaaaaactactgtggaccacaagcagagtgctgaaggtgctatctgtctgctctagtaataagccggctattgtagaagctggtggaatgcaagctttaggacttcacctgacagatccaagtcaacgtcttgttcagaactgtctttggactctcaggaatctttcagatgctgcaactaaacaggaagggatggaaggtctccttgggactcttgttcagcttctgggttcagatgatataaatgtggtcacctgtgcagctggaattctttctaacctcacttgcaataattataagaacaagatgatggtctgccaagtgggtggtatagaggctcttgtgcgtactgtccttcgggctggtgacagggaagacatcactgagcctgccatctgtgctcttcgtcatctgaccagccgacaccaagaagcagagatggcccagaatgcagttcgccttcactatggactaccagttgtggttaagctcttacacccaccatcccactggcctctgataaaggctactgttggattgattcgaaatcttgccctttgtcccgcaaatcatgcacctttgcgtgagcagggtgccattccacgactagttcagttgcttgttcgtgcacatcaggatacccagcgccgtacgtccatgggtgggacacagcagcaatttgtggagggggtccgcatggaagaaatagttgaaggttgtaccggagcccttcacatcctagctcgggatgttcacaaccgaattgttatcagaggactaaataccattccattgtttgtgcagctgctttattctcccattgaaaacatccaaagagtagctgcaggggtcctctgtgaacttgctcaggacaaggaagctgcagaagctattgaagctgagggagccacagctcctctgacagagttacttcactctaggaatgaaggtgtggcgacatatgcagctgctgttttgttccgaatgtctgaggacaagccacaagattacaagaaacggctttcagttgagctgaccagctctctcttcagaacagagccaatggcttggaatgagactgctgatcttggacttgatattggtgcccagggagaaccccttggatatcgccaggatgatcctagctatcgttcttttcactctggtggatatggccaggatgccttgggtatggaccccatgatggaacatgagatgggtggccaccaccctggtgctgactatccagttgatgggctgccagatctggggcatgcccaggacctcatggatgggctgcctccaggtgacagcaatcagctggcctggtttgatactgacctgtaaatcatcctttagctgtattgtctgaacttgcattgtgattggcctgtagagttgctgagagggctcgaggggtgggctggtatctcagaaagtgcctgacacactaaccaagctgagtttcctatgggaacaattgaagtaaactttttgttctggtcctttttggtcgaggagtaacaatacaaatggattttgggagtgactcaagaagtgaagaatgcacaagaatggatcacaagatggaatttatcaaaccctagccttgcttgttaaatttttttttttttttttttaagaatatctgtaatggtactgactttgcttgctttgaagtagctctttttttttttttttttttttttttgcagtaactgttttttaagtctctcgtagtgttaagttatagtgaatactgctacagcaatttctaatttttaagaattgagtaatggtgtagaacactaattcataatcactctaattaattgtaatctgaataaagtgtaacaattgtgtagcctttttgtataaaatagacaaatagaaaatggtccaattagtttcctttttaatatgcttaaaataagcaggtggatctatttcatgtttttgatcaaaaactatttgggatatgtatgggtagggtaaatcagtaagaggtgttatttggaaccttgttttggacagtttaccagttgccttttatcccaaagttgttgtaacctgctgtgatacgatgcttcaagagaaaatgcggttataaaaaatggttcagaattaaacttttaattcattcgattg

SEQ ID NO: 84 - DNA, 2995 bp, Homo sapiens
ggtgactctcggagcgggaggcggaggctgaggcggccgctcctgctgctgctactgccgccgccgcagcggctgctcgggctgagcacgccccggaacaggccgccgcgcgctgcgcgccggacccgctgcccctgccggcccggccgggtcgggcggcccagggaccgacagacttgacaacggtgacagcactggggcggcaccttcctacttctgcccagccacagccctcccctcacagttgagcacctgtttgcctgaagttaatttccagaagcaggagtccccagagccaggcagggggatgaaccgcgagggagctcccgggaagagtccggaggagatgtacattcagcagaaggtccgagtgctgctcatgctgcggaagatgggatcaaacctgacagccagcgaggaggagttcctgcgcacctatgcaggggtggtcaacagccagctcagccagctgcctccgcactccatcgaccagggtgcagaggacgtggtgatggcgttttccaggtcggagacggaagaccggaggcagtagctgcaaagcccttggaacaccctggatgctgttgagggccaagagatctgtgtggctcctgggccggctgagtggcagcagccccccttgccccacctcccccttcccctacccaaccctgccctgccccaccccacctcacagctactcagtggggctggcatcaagggagacaccagtggtgcgtttataattggcttaaagggatggacttgtgattggctgcaggaagaaacttttttattttttaaatcttgaccaacagaaaccttttatttttatttctgactcttattttttaaaaaatttgcgcctcggtatctggcttccctggaagctctccgagctctggtgctttagttaggtcatttttttagaaatgtgaagaggtctgattggctgcttaaactggaaaggatctgtgattggctggttaatgggaaacggtttttttctttggctgcaggtgttctgctgatatcaacagcttccctattttgaatgcagaaaacagggtctgggacattagtcgttatatttgacttgaaaagaaagaaaccaagtgcgctttgcaatatttattacacaaagaacttgctgctgccttcacatttggggtttgtgtttgattggctttcgatgcgtgtgtttggtttcccattggttcacctgtgactcctgttgccatggattcacccccctctgctgccggctctgggcctgagggtccacctggagagtacatttgctttaatgagtgcacctgcctccaccagcaaggggaccccgagaaccctgagcagggtccacagctggaaagttgggcccctgaggagctttgtgtcgtcttgaacgagcagcccagggcctagaggtaaccgttaggcgggatttatgtgcactgcctgcatgagctggcaaccagccagcgtcccttggtgagaaagggattgctgaggcaccgtccaggccccaccggccaggccgcgcccagcagaggcgtactacccagctctgtcctcttggccatccttctgtgtaccacttcctgaggcctcattttgggggtcatcttggaaaggggaggagcttctcccagtgtgagaccccaaagactctggaggtcatctggcggaggtctctgggagcccagaacccacataaaagccccagcttggctcacaaggcccaggagacctccagctaaacaccaacccctgacctaccccagccaggctcctacctgtctgctgccagcacagtaggtcccggccagctctggagttctctcatcggaggcccatgccctccactccactgcctttggaagggtctctctccaggtcagcctggaagggacagtatcgtttgtttatgaaatgccactgggacagctggctgggccttcaccaagcaagtcccttcagactggcccttaagccaaactcaggcccagaattgcagttcagaatggcagtcctggaggcagggggtgaggggcaggtctagtgttcctgcaccaaacctaagtccttccacctgccacccccttccctgggagggaggtggtcctcctatctccctggctcactggcaggtgtgggatctggggagagcggctggagaaagatgcagtcctcaggaagggggccgccaccctcccctatgctggtagatgctgaggcccctaggtgcccagggccagtgggaccctctcagaaccaaatctttcccctttctcggggcttggggctcgggccgtaggggctcctgagtgtcatgaagtgcacaggagccaaatgaccgagccctggagagccccatggtgggtaggtggttcgtgctgtgctctggcaccatcagcctgttccagaaggaggattcgagcatcaggctaagaccctgtgtcctccaccatgcactcacccctagccctggttagctgacagtcagctgtggggaacacagctacaaccctaccctggcagggacctgagagcatctcaggaggggcagcgcatgtgtgcatgtgctgtgtgagtgagcacacccgtgtgcacactcatacacatgtgcacacacacgcactctccccgctcaggggcctggaggtctggctgagcccctggggaaaggtgagttctttcatctccctcctccaggtcggagtgcctggagtcaggtgtcgaggccacattgctggctgccccctctttgtagctcctataaagggcccacacctggtggatacctggttgagtgtgtggtctctgccccagcctgtccttgtcacgatcacaggccttgcttttgtaacaatgatgaccccggcctgtctcatcttctgaagaggaaaagtcaaagtgttgctgtggctccatatttcaactaaaaatatatctgttggagaaagaaattaacaataaagaattttcataggtt

SEQ ID NO: 85 - DNA, 3226 bp, Homo sapiens
aggaggagggccgggcgggcaggggaggaggaggaggcgggcgccgtgtcgcacgcagctccaggcggggcagccccggtagctgagggacgcagctagaccttggcgggacggggctttcgccggggcccaggcccagggaccaggcggaggcgtcgcgggagcctttggggcaccacagagatgcgggtttgcctgcaatgagatttcattctctacatttaaaggacatcctttctgagctgctgtgaataaatttggaatggtactgtatattttcatctaatggagaactagctgtactttgaataaggattgctgcactggacgactttagaacatccctcacaatgtcgtcaacccggagccagaacccccacggcctgaagcagattggcctggaccagatctgggacgacctcagagccggcatccagcaggtgtacacacggcagagcatggccaagtccagatatatggagctctacactcatgtttataactactgtactagtgttcaccagtcaaaccaagcacgaggagctggagttcctccttctaagtcgaaaaaggggcagacacctggaggagctcagtttgttggcctggaattatataaacgacttaaggaatttttgaagaattacttgacaaatcttcttaaggatggagaagatttgatggatgagagtgtactgaaattctacactcaacaatgggaagattatcgattttcaagcaaagtgctgaatggaatttgtgcctacctcaatagacattgggttcgccgtgaatgtgacgaaggacgaaaaggaatatatgaaatctattcgcttgcattggtgacttggagagactgtctgttcaggccactgaataaacaggtaacaaatgctgttttaaagctgattgaaaaggaaaggaatggtgaaaccatcaatacaagattgattagtggagttgtacagtcttacgtggaattggggctgaatgaagatgatgcatttgcaaagggccctacgttaacagtgtataaagaatcctttgaatctcaatttttggctgacacagagagattttataccagagagagtactgaattcttgcagcagaacccagttactgaatatatgaaaaaggcagaggctcgtctgcttgaggaacaacgaagagttcaggtttaccttcatgaaagcacacaagatgaattagcaaggaaatgtgaacaagtcctcattgaaaaacacttggaaattttccacacagaatttcagaatttattggatgctgacaaaaatgaagatttgggacgcatgtataatcttgtatctagaatccaggatggcctaggagaattgaaaaaactgttggagacacacattcataatcagggtcttgcagccattgaaaagtgtggagaagctgctttaaatgaccccaaaatgtatgtacagacagtgcttgatgttcataaaaaatacaatgccctggtaatgtctgcattcaacaatgacgctggctttgtggctgctcttgataaggcttgtggtcgcttcataaacaacaacgcggttaccaagatggcccaatcatccagtaaatcccctgagttgctggctcgatactgtgactccttgttgaagaaaagttccaagaacccagaggaggcagaactagaagacacactcaatcaagtgatggttgtcttcaagtacatagaagacaaagacgtatttcagaagttctatgcgaagatgctcgccaagaggctcgtccaccagaacagtgcaagtgacgatgccgaagccagcatgatctccaagttaaagcaagcttgcgggttcgagtacacctctaaacttcagcgcatgtttcaagacattggcgtgagcaaagatctgaacgagcaattcaaaaagcacttgacaaactcagaacccctagacttggatttcagcattcaagtgctgagctccgggtcctggcccttccagcagtcttgtacatttgccttgccgtcagagttggaacgtagttatcagcgattcacagctttctacgccagccgccacagtggccgaaaattgacgtggttatatcagttgtctaaaggagaattggtaactaactgcttcaaaaacagatatactttgcaggcgtcgacattccagatggctatcctgcttcagtacaacacggaagatgcctacactgtgcagcagctgaccgacagcactcaaattaaaatggacattttggcgcaagttttacagattttattaaagtcgaagctattggtcttggaagatgaaaatgcaaatgttgatgaggtggaattgaagccagataccttaataaaattatatcttggttataaaaataagaaattaagggttaacatcaatgtgccaatgaaaaccgaacagaagcaggaacaagaaaccacacacaaaaacatcgaggaagaccgcaaactactgattcaggcggccatcgtgagaatcatgaagatgaggaaggttctgaaacaccagcagttacttggcgaggtcctcactcagctgtcctccaggttcaaacctcgagtccctgtgatcaagaaatgcattgacattctaattgagaaagaatatttggagcgagtggatggtgaaaaggacacctacagttacttggcttaacccttctggaagggtctgactgtgtgacccgcagcaaatagttcatgttggaaagaatgaaaacaactcaagttcatagcagccagcctgccgccattggacctcccttttaaaaactgagaccaagactcccatcagctggtctcggatttacatcggaactgctcaggattgatacatttcaagtctgtaaatacggacaccaacgccatttaccctaatttaagaacagcggggactgaccctccgtgccgagggctgcatgctaccgcactaagtcaatacatgggctccccgattcgcagctgtcgtcttggcagcacttgtcacgttggcagcactttgagagcaagtctgagtggacccacatgtaacctgctatgaaaaccatttgtatagtgtgtttcattttttaatgtgtgaaaataaagaaaattaaaggatttctgtacaagtcgcattgggttttgttttaagttttactaatttctatatgtaaataaaagatataatgattgtgcaaatttaaaaaaaaaaaaaaaaaa

SEQ ID NO: 86 - DNA, 761 bp, Homo sapiens
ggcggcaggaccagcatgcaccaccgaaacgactcccagaggctggggaaagctggctgcccgccagagccgtcgttgcaaatggcaaatactaatttcctctccaccttatcccctgaacactgcagacctttggcgggggaatgcatgaacaagctcaaatgcggcgctgctgaagcagagataatgaatctccccgagcgcgtggggactttttccgctatcccggctttagggggcatctcattacctccaggggtcatcgtcatgacagcccttcactcccccgcagcagcctcagcagccgtcacagacagtgcgtttcaaattgccaatctggcagactgcccgcagaatcattcctcctcctcctcgtcctcctcagggggagctggcggagccaacccagccaagaagaagaggaaaaggtgtggggtctgcgtgccctgcaagaggctcatcaactgtggcgtctgcagcagttgcaggaaccgcaaaacgggacaccagatctgcaaatttagaaaatgtgaagagctaaagaaaaaacctggcacttcactagagagaacacctgttcccagcgctgaagcattccgatggttcttttaaagcagtagtatatcttattttcaaggcatttggaaatgaagggcaaactaatgtcttgttttaagaaactgcttagtccaccactgaagaaaatatccagaaattattttcattttatgtatagggatttcttcaaaaaaaaaaaaaaa

SEQ ID NO: 87 - DNA, 4256 bp, Homo sapiens
tacgagcggctgtgaaggaaactgtttaaccggatcccattgtacccagagtgcagagccgcctttccagcatgcaggggctgctcagcgtttagtcacatcaagaaatagaacagaattcagccatggccccaagaaagagaggtggacgaggtatttcattcatcttttgctgtttccgaaataatgatcacccagaaatcacgtatcggctgcgaaatgatagcaactttgcgcttcagaccatggaaccagcattgcccatgccccctgtggaggagctggatgtcatgttcagtgaactggtggatgaactggacctcacagacaaacacagagaagccatgtttgcacttccagctgagaaaaaatggcaaatatactgtagcaagaaaaaggaccaggaagaaaacaagggagctacaagttggcctgaattctacattgatcagctcaattccatggctgctagaaaatctctgctggctttagagaaggaagaagaagaagaaagaagtaaaactatagagagtttaaagacagcactgaggacaaaaccaatgaggtttgtaaccagattcatcgacttggatggcctatcatgtatcctcaactttctaaagaccatggactacgagacctcagagtctcgaatacatacttctctcattggctgtataaaggcgttaatgaacaactctcaaggccgggctcacgtcctggctcattctgagagtattaatgtaattgctcagagtctgagcacagagaacattaaaacgaaggtggccgtgctggaaatcttgggcgccgtgtgcctggttcccgggggccacaagaaggttctgcaggccatgctgcactaccagaagtatgccagcgaaaggacccgctttcagacattaattaacgacttggataaaagcactgggcggtatcgagatgaagtgagtctcaagactgccatcatgtccttcattaatgcagtgctcagccaaggtgcaggagtggagagtttggactttagacttcatcttcgctatgaatttctgatgttaggaattcaacctgtaatagataaattaagggaacacgaaaattcaacattagataggcatttagacttttttgaaatgctccgaaatgaagatgaactagaatttgccaaaagatttgaactggttcacatagacacaaaaagtgcaactcagatgtttgagctgaccaggaagaggctgacacatagtgaagcttacccgcatttcatgtccatcctgcaccactgcctccaaatgccttacaagaggagtggcaacactgttcagtactggctactactagatagaattatacagcagatagttatccagaatgacaaaggacaggaccctgactccacacctttggaaaactttaatattaagaatgtcgtacgaatgttggttaatgaaaatgaagttaagcagtggaaagaacaagcggaaaaaatgagaaaagagcacaatgagctacaacagaaactggaaaagaaagaacgagaatgtgatgctaagactcaagagaaggaagagatgatgcagaccttaaataaaatgaaagagaaacttgaaaaggagactactgagcataagcaagtcaagcagcaggtggcggacctcacagcacagctccatgagctcagcaggagggccgtctgtgcttcaatcccaggtggaccctcgcctggagcaccaggagggccctttccttcctctgtgcctggatctctccttcctcccccaccacccccacctctaccaggtgggatgcttccccctccaccgcctcccctccctccaggtggccctcctcctcccccagggcctcctcccttaggggcaatcatgccacctcctggtgctccaatgggcctagcactgaagaagaaaagcattcctcagcccacaaatgccctgaaatccttcaactggtctaaactgcccgagaacaaactggaaggaacagtatggaccgaaattgatgatacaaaagtcttcaaaattctagatcttgaagacctggaaagaaccttctctgcctatcaaagacagcaggatttctttgtgaacagtaactccaagcagaaagaagcagatgccattgatgacactctgagttccaaacttaaagttaaagagctttcggtgattgatggtcggagagctcagaattgcaacatccttctatcgaggttgaaattatccaatgacgaaatcaaacgggcaattctaacaatggacgaacaggaagatctgcccaaggacatgttggaacagctcttgaaatttgttcctgaaaaaagtgacattgacctattggaggaacataaacacgaactggatcggatggccaaggctgataggttcctttttgagatgagccgaattaatcactatcagcaaaggttgcaatcgctgtacttcaaaaagaagtttgcagagcgtgtggcagaagtgaaacctaaagtggaagcaattcgttctggctcagaagaggtgtttaggagtggtgccctcaagcagttgctggaggtggttttggcatttggaaattatatgaataaaggtcaaagagggaatgcatatggattcaagatatctagcctaaacaaaattgctgacacaaaatccagcatcgacaaaaacattacccttttgcactatctcatcactattgtggaaaataagtaccccagtgttctcaatctaaatgaagaattgcgagatattcctcaagctgcgaaagtaaacatgactgagctggacaaagaaataagtaccttgagaagtggcttgaaagcagtagagacagagctggaatatcagaagtctcagcccccacagcccggagataagtttgtgtctgttgtcagccagttcatcacagtagccagcttcagcttctctgatgttgaagaccttctagcagaagctaaagacctgtttactaaagcagtgaagcactttggggaagaggctggcaaaatacaaccagatgagttctttggcatttttgatcaatttcttcaagctgtgtcagaagccaaacaagaaaacgaaaatatgagaaagaaaaaggaggaagaagaacgtcgagctcgcatggaagctcagctcaaagaacaacgtgaaagggaacgtaaaatgagaaaagctaaagagaatagtgaagaaagcggagagtttgatgaccttgtttcagctttacgctcaggagaagtgtttgacaaagacctttctaaattgaaacggaatcgcaaacgtattaccaaccagatgactgacagcagcagagagagaccaatcacaaaacttaatttctaattttccatgaatacttttttttagaaagctcattagcagccctctaaagtgactagaacgtttcattacactgccttgcaatccaaacagtggcaattttttccttcatctgtgagtgaatgtgtgaacgtgtgtatgtaaatgtatgtgtgtatatattaaaaaatgtatatagatgtctgagtgttgtctggagacctatacgtatggttaaaaagatttatgttaatgtatgtgctccaaaacctttcgtgtatgcattcacattgagtgtggctcattttctttccccgaacgccatgactgttcagaagcacaatactatctcctgaaagagataagagacattccctagattcaaaggcaaaacagaagaaacaaacaaacaaacaaacaaagcttgcaaaatattttatggtttccaagcttgatatcctttaaaattattttcattgatggaactggagttgttggaaaaacatagatttaaaatgatttttgatagctgacattgtgatgttgatgtatcacatcagtaataggaccagctttgaatttctgacattggtgtggggatacagtctgtaaatgtttattgagaacatcttgcacacaatttgaattatgtagaatgtcaatcaagtttttgtatatttaaaagttggacatcaattttttcccctgatttcatcaagttatctctgccaagtgctcttgataatttcttcagatttttggaaaaaaacactatataaatgcaatccatgctttttttaaagaacaacattgccagagtatgcttgttctaacaatatagatatataaaccttaaaaataataaaatatctcacccaagacttaaaggaagaattctctgaagggataaagattact

SEQ ID NO: 88 - DNA, 6215 bp, Homo sapiens
caggaaaggggtccccggactctggggctctcagcacctgcggtcgcaaaccaacctcatgccctgactttaccaggcgtcgggactctgacttaaccggggaatgagggacttggtctggcggcagatcacaatgaggacctagggcatctgtctgctgacgccccctggcctgcagtgaccatggccccccgcaagaggagccaccatggcctgggcttcctgtgctgcttcgggggcagtgacatccccgaaatcaacctccgggacaaccaccctctgcagttcatggagttctccagccccatcccgaacgcagaggagctcaacatccgctttgcagagctggtggatgaattggatctcactgacaaaaaccgagaggctatgtttgcactgccccctgagaagaaatggcagatctactgcagcaagaagaaggagcaggaggaccccaacaagctggcaaccagctggcctgactattacatcgaccgcatcaattccatggctgcgatgcagagtctgtacgcgtttgatgaggaggagacggagatgaggaaccaagtcgtggaagacctgaagacagccctccggacacagcctatgaggtttgtgacccgcttcattgagctggagggcttgacctgtctgctaaatttcctccggagcatggaccacgccacctgtgagagccgcatccacacctcactcattggctgcatcaaagcattgatgaacaactcccaggggcgggcacatgtgctggcacagcctgaggccattagtaccatagcccagagcctacgcacagagaacagcaagaccaaggtggctgtgctggagatcctgggtgctgtgtgcctcgtgcctggtggccacaagaaggtgctgcaggccatgctgcactaccaggtgtatgcagcagagcgaacccgcttccagaccctgctgaacgagctagaccgaagtctgggccggtaccgggatgaagtgaatctgaaaacagccatcatgtccttcatcaatgctgtcctcaatgctggagctggagaggataatctggagttccgcctacatctacggtatgaattcctgatgctgggtatacagcctgtgattgacaagctccggcaacatgaaaatgccatcctggacaaacatttagacttcttcgagatggtgcggaatgaggatgacctggagctagccaggaggtttgacatggtccacatcgacaccaagagtgcttcccagatgtttgagttgatccacaagaagctgaagtacacggaggcctacccctgcctgctctctgtgctgcaccactgcctgcagatgccctacaaacggaacggtggctacttccagcagtggcagctcctggaccgcatcctccagcagattgtcctccaggatgagcggggtgtggaccctgacctggctcccttggagaacttcaatgtcaagaacatcgtcaacatgctcatcaacgagaatgaagtgaaacagtggcgagaccaggcagagaagttccggaaagaacacatggagcttgtgagccgtctggagaggaaggagcgggaatgcgagacaaagacattggagaaggaagagatgatgcggacgctgaacaaaatgaaggacaagctggcccgggagtcccaggagctgcgccaggctcggggacaagtggcagagctggtagcccagctcagtgaactctcaacaggccctgtatcttccccaccaccccctgggggcccactcaccttgtcttcctcaatgacaaccaatgacctgcctccaccccctcctcctctgccctttgcctgttgtccccctcccccaccaccaccccttcctcccgggggacccccgactcccccaggtgccccaccttgcctcggcatgggcctgcccctccctcaggacccctaccccagcagtgacgtcccactcaggaaaaagcgtgtcccccagccttctcacccactgaagtccttcaactgggtgaagctgaatgaggagcgtgtccctggcaccgtatggaatgagattgatgacatgcaggtatttcggatcctggacctagaggattttgaaaagatgttttcagcctaccagaggcaccagaaagagctgggctccactgaagacatctacctggcttcccgcaaggtcaaagagctgtcggtcattgatggccggagggcccaaaactgcatcatccttctttccaagttgaagctttctaacgaggagatccggcaggccatcttgaagatggatgagcaggaggaccttgctaaggacatgctggagcagctcctcaagttcatcccagagaagagtgacattgacctcctggaggagcacaagcatgaaattgagcggatggcccgtgctgaccgcttcctctatgaaatgagcaggattgaccactaccagcagcgactgcaagccctcttcttcaagaagaaattccaggagcggctggctgaggcaaagcccaaagtggaagccatcctgttggcctcccgggagctggtccgcagcaagcgtcttagacagatgctagaggtcatcctagccataggcaacttcatgaacaaagggcagcgtgggggcgcctacgggttccgggtggccagcctcaacaagatcgctgacaccaagtccagcatcgacagaaacatctctctgctccattacctgatcatgatcctggagaagcattttcctgatattctaaacatgccttcagagctgcaacatcttccagaagctgccaaagtcaacctagcagaactggagaaggaggtgggcaacctcaggaggggcctgagagcggtggaggtgctggagtatcagaggcgccaggtacgggagcccagtgacaagtttgtccctgtcatgagcgacttcatcacggtgtccagcttcagcttctccgagctggaggaccagctaaatgaggccagggacaagttcgccaaggccttgatgcacttcggggagcatgacagcaagatgcagccagacgaattctttggcatctttgataccttcttgcaggccttctcagaggcccggcaggatctagaggccatgaggaggaggaaggaggaggaggagcggcgggcgcgcatggaagccatgctgaaggagcagagggaacgtgagcggtggcagcggcagcggaaggtcctggctgcaggcagctcgctggaggagggaggagagttcgatgacctggtgtcggccctgcgctctggggaggtcttcgacaaggacttatgcaagctcaagcgcagccgcaagcgatcagggagccaggccctggaagttacccgggagcgggcaataaaccggctaaattattgacctggggaactagccacacaggaggccgggagacagggactggtgagaatggggctgagtggaggaggtggtgatatttaaaccatttggtgcttggtttagagccttgggctgggtcctgggatggggggctgtgtgtggctggaccaggtgtctccccacgcttaccttaaggggctcctcttatctccccttcacatgattccttctgtgccctggccccaggtattattctgaggctgccttggatggcctcaggccaggtaaccccaggctgaaggggccctgctccccatcccctaccatgggcacccatgtgctggcacagaacagttccagatctagactggagaggtccacagccttgtccagagttcctgtgtagcacggggagcaatgatggagggagcccctgagagggaatctggtgagggaatccagactcccttctctcaaggggaggctcaacagaacattgacctgggggcaaactttcctcttgaatgggaacagaggaggcattatatattctagttagatcagctctggtaggttccagagaacagtcaatgttggaaggatgatgcagggaccaaagccatcaggacagagtagcagtgtctgtttcccatgtcacaagtcctctggcctctccctgcatgtcttaagtatctttcccttccttctctaccctcacctccatcctgtctactaatccacagtcctagaagactcaccttgggtttccacagctatggctcactaccaggtgcttgatgaatctggcgaggggctcaagacagacctcatgcatcaccacacctcatgccttttgggcatctcccatgtccccatctcctggacacctggccattgttgtgaagccagacagtgacctcaaatgttgccttggagtcccctacagcccctcagcagagggcagcacttgaatgcttagctccatcccatagttctctacttcatataaattgctcaggccctcccaccccttctctaacactagcttcaaggcagaagccacagcagcctctgtccagcctgcaggtggccacttggaaccatgtgtccactggcgttggggagttggttcctgagaggtctgagggccagagctgccctctacattaacatgctgtctctaagggtggcccctcctctcaggcgttcagatggtgcgaacagcagagcaggcaagggaaactggggagatggggatggaggaggaaggctgatatcctctggggagcacatcacctgaaggtgccaaggaggaaggctgagaggggggccaccccatttctggtacccaatttggttcttcagcccaacttgcaaggggttccttctggtcctcccatccactgccaccttccattttgtccatctcatgctggccttggtggatgggatggctgtatctagacaaaatttttctaaaactccatcaaggctcttattcaataccacgttccgagttggcctttcatcttctttgagactggccctgcctaacctctaccatcaatgagctcttggcccttctgcccttccctgtgtttctcactttccaacctaatccctggctcagggttattgccagtggagactggtgagctgggcctactctcagctgcctatcttctgcctttcacttgcatccaactcctggggctgggaccgtagtagctgcgggggggaagaaacacagggtcggtgagcccagcatgtgcgttggtttgagggggcgggcggtgtgtgtgtgttctggtgggagggatctgagcaagtgcaagcctggctgacacaggtgtgaagaggccatcctggaacccaggtgagggcaagatgaaggcttccaggcagaacagctgcagagagtttggctatatgcatctgcagccccaagagctcccactgcaagacaagtgttggggaagatgggaggttgtgggtgaggcctctaaaggtcctctcccaaactgaccaggctgatgtcaacctaaccccctcaggggcagggaacaggggagggctccacaagcgtgtctggcattcccacccaccatggaagactggatacgcacctggaaacaaaaggactatggaagctgttcaagatacatttgatcttcagaaaagcagaatttggttcaactgttgacagaggacacaaatacgttgttccagagctcagccttctcactctaaaagaaagatatttttctatttattttctacatctggccagtggctctggtgctagatgccactgtagccagatctccaacagtgccttggaccatggactcatactcaactgagtaagaaggggctggtgcccagtcggggtggctgagctggtccttaataggttgtttcttggtcttgctttcttcatgccctccccactgctcctgccacctttagataagtttctctagctaattttgtggccaatgtaaaattcgtcatcaacctaacaaacacaaccttctcagcagcatttctcccctgtgatggaaataaagtgtttagggcagtgggaggagaaaattctccaggtgaatggggaagggtctgttccagcctctccctactcccatcccatttccaccaactggggaactgtgactatctatctcccccgacttctaccagggatgccttcacgccaaggctgttctcaccagctgcctcagatgacaaatgaggctaatggacataatctacagtgtcctttttcacttgcaccttttttataagaatatattgtaatactaaaaaatattaaattcataccatcccta

SEQ ID NO: 89 - DNA, 4597 bp, Homo sapiens
gtccttatttgcacccgccccccgcccgcgtcggtctggggcttttgacttctccccgaacacatttcccctcccgtcgctgggtccctgcgatcgcccccagctggtggggctcgcggagctcaggggagcggggtcctctgcgccgctgcagcgcgagttaataaacagttaagtttggaagactctgcagacacgttgagggggagttaccaagcccaggcagcaaaaacatcctggcacattcctggggagtcctcagctgccagcatctgattagaaccatatctctcgccgggagtggccgcgcggctccgaagctcccggccggcggctatttaagcgaggcccgccgcatccgctgcgctgtagcctggaggctccgggcgcggggaagtcatgctcgcttcacggaggcaatagctagccggtgtctgtgggaggttatgtttatttgagacttctccatcgggatcgcctggtgtcaccaagtgtccactggtactgaggtttgctgcctgccttcttgccatgtctaacgaagtagaaacaagtgcaaccaatggtcagcccgaccaacaggccgcaccaaaagcaccctcaaagaaggaaaaaaagaaaggccctgaaaagacagatgaatatctcttagcaaggttcaaaggcgatggtgtaaaatataaggccaagctgattggcattgatgatgtgccagatgcaagaggggataaaatgagccaagactctatgatgaaactaaagggaatggcggcagctggtcggtctcagggacaacacaaacaaaggatctgggtcaacatttccctttctgggataaaaataattgatgagaaaactggggtaatagagcatgaacatccagtaaataagatttctttcattgcccgtgatgtgacagacaaccgggcatttggttacgtgtgtggaggagaaggccagcatcagttttttgccataaaaaccgggcaacaggctgaaccattagttgttgatcttaaagacctttttcaagttatctataatgtaaagaaaaaggaagaagaaaagaaaaagatagaggaagccagcaaagcagttgagaatgggagtgaggccctaatgattctagatgaccaaactaacaaactgaaatcgggtgttgaccagatggatttgtttggggacatgtctacacctcctgacctaaatagtccaacagaaagcaaagatatcctgttagtggatctaaactctgaaatcgacaccaatcagaattctttaagagaaaatccattcttaacaaacggcatcacctcctgttctcttcctcgaccaacgcctcaggcatccttcttgcctgaaaatgccttttctgccaatctcaacttctttcccacccctaatcctgatcctttccgtgacgatcctttcacacagccagaccaatcgacaccttcttcgtttgattctctcaaatctccagatcagaagaaagagaattcgagtagctcgtctactccgctgagtaatgggcccctgaatggtgatgttgactactttggtcagcaatttgaccagatctctaaccggactggcaaacaggaagctcaggcaggcccatggcccttttcaagttcgcaaacccagccagcagtgagaactcaaaatggggtatctgaaagagaacagaacggcttctctgtcaaatcctccccgaacccttttgtgggaagccctcccaaaggactgtccatacagaatggcgtaaagcaggacttggaaagctctgtccagtcctcaccacatgactccatagccattatcccacctccacaaagtaccaaaccaggaagaggcagaaggactgctaagtcttcagccaatgacttgcttgcatcagacatctttgctcctcccgtctcagaaccttcaggccaggcgtcacccacaggacaacctacagccctgcagcccaaccctctggatctcttcaaaacaagtgctcctgccccagtggggcccctggtgggtctaggtggtgtaactgtcacactccctcaggcaggaccatggaacacagcatctttggtcttcaatcagtccccttcaatggctccgggagccatgatgggtggtcaaccttcaggttttagtcagcccgtcatttttggtacaagtccagctgtttcaggttggaaccagccttcaccctttgcagcctcaactccccctccagtgcctgttgtctggggcccttctgcatctgtggcacccaatgcttggtcaacaacaagccctttggggaatccttttcagagcaatatttttccagctcctgctgtgtccactcagcccccatccatgcactcctctctcctggtcactcctcctcagccacctcccagagctggccctcccaaggacatctccagtgatgccttcactgccttagacccacttggggataaagagatcaaggatgtgaaagaaatgtttaaggatttccaactgcggcagccacctgctgtgcccgcgcggaagggagagcagacttcttctgggactttgagtgcctttgccagttatttcaacagcaaggttggcattcctcaggagaatgcagaccatgatgactttgatgctaatcaactattgaacaagatcaatgaaccaccaaagccagctcccagacaagtttccctgccagttaccaaatctactgacaatgcatttgagaaccctttctttaaagattcttttggttcatcacaagcctctgtggcttcttctcaacctgtatcttctgagatgtatagggatccatttggaaatccttttgcctaaattctgaacttggtctgcagaccatccagaggaataaaaaggttggccttagtagtcaaaaacaaagctgatagccagacacgttctgatttctgcccttgttccagctttgacgtattatctgttgccttatttctcattgcctcttctacttgtaaaatgcttttcactttctgtctaggttaaagctaaactgaatctatggctttaaataaattaagatcctaaactctctagcttaagtgtaaatgaagtacagtagtttccctactgaaccctgcctcttgtgtccctggaaccttctagaacacctgccttctaccctctggttgggagatgcagccaccacatcccttcatatcatactgttttgaataaattttcaaatccttattgttcagagttgtttgggggttctgtttcagagcataaaacctaaaggttatagtagaacaaggcaccttcttaaaagaaatcttgcttcagaccatcagttacagagaatttctaaagtaaaattgaagcaactacaacttctccttagacactttggaatctaaccacttaaggacctttttaaagagatagcttctcttctttctgaagatcaatttctcccaaggccaagattgtccttttctcccatttcttgctagctattgcaaatgagggaagaacattattcatctctcctccccttttttttctgattcttttttcagtcagttttgctcctgggttcaagtagtattaccaccctttcacaagcaacagactctcacagggcaaaaaaaaaaaaaaatctaatgattcacagacagatctggagcctctcttcattctcagtaattgctagtcccaagaactagaattgcaaatgggcacaacctatatccttcctgtggaagaggaggccactctcttgagctgaagttccagaagagcagttaatgttcaagagaaattgaactcaactcagcaacaaaggactctattttgaagagcaacatatcacaaagctaaatgtgattgtgccaaacacattaggtgcttatttggggtcatgctaggcctttatcaagtaactggaaaacttttcttgcagccacaatctcaatgtcgttagtaggaagataagaggggagaaaaagctgtagaacaaatgtttggggttaccattgaaaatctaatgtctgcaatatttttctcctcacaacttggaaacgttcccagttcattttcagtcctgttgtgagcacagttctgaagggtttattattgtcaaaataagttttgttttgttttgtttatgttgggtttttaatgttgtctcttgacccttaatgctcaggttcttgtgggagttaatcagccacatccaatgttaccttgagggggaagaagagggtgatgctcagaagctaaacaagacaggggccacatgaccctctattgattagccccaagtagaaagtcctgtggttttatgtttaatggtaatagttgatcatatatggcataattttctatcagcttcctactcagtcactataaacacagacttgaaatagtactttaaatgtccaaatacctaaatgtgctaaactggaggtaactatttctaggtagttgaatttttgaaagtcatgatcagccacacaactgttttgtacatacttattttctcatgcacttttctgtatgcaaataaagctataaatttactcatttcaataaactggagtggcagaat

SEQ ID NO: 90 - DNA, 5899 bp, Homo sapiens
tcccgcaggaaagcggggctgggggcagcccggcagcgccgctcaacctagtgcgcgcccagttgtttccataggaaccgcgaccgcgccgggcccctccagcggaggcccccgtgcgagcatgcccagtgcaagccgctagtttggctccagtctaggtttccagtaagtggcatgcgggactccggagggatcccaatgagctgagccgagagcctttgtgtgcagagggaggaggaggaggcggcggcggccgccgggctggagaccccgcccggggagcccccagcaggaacaatgctagcctgcctgacccgagggaacttactggacgtcctgcaggagggcttcaatgagcaacagctgcaggcctatgtggcctgggtgaatgcacagctgaagaagaggccagcagtgaagcctgtgcaggacctgcgacaagatctccgggatggggtgatcctggcatatctcatcgagattgttgcaggagaaaagctgagtggggtacagctgagtcccggtaaccaacaggagatgaagaataatgtggagaaagtgctacagtttgtggcctctaaaaagattcgtatgcaccagacttcggctaaagatattgtggatggaaacctgaagtctatcatgaggctggtccttgccttggcagctcatttcaaacctggctccagcaggacggtgaaccaaggacgggactccagagcccctctgcaaagtcaccgaccacactgtgccactgctgttgcccagggagcagctgctgctctggccgatgtgtgtcatgacatgtcccgatcaggacgggatgtctttcgatatagacagaggaacagcagcatggatgaggaaattgagaatccatactggagtgtgcgggccctagtgcagcagtacgaagggcaacaaaggtccccgtctgaatccagctgctccagcctgacttcacccagtccaatccacagtgcaaagagcgagtccattataacccagtcagaagagaaggcagattttgtgattattcccgctgaaggaatagagaacagaacagaagggacagattctccattatctcgagactggcggccagggagccctggaacctatctggagacctcatgggaagaacagctgttggaacaacaagaatatttagaaaaagaaatggaggaagcaaagaaaatgatatcaggactacaggccttactgctcaatggatccttacctgaagatgaacaggagaggcccttggccctctgtgaaccaggtgtcaatcccgaggaacaactgattataatccaaagtcgtctggatcagagtatggaggagaatcaggacttaaagaaggaactgctgaaatgtaaacaagaagccagaaacttacaggggataaaggatgccttgcagcagagattgactcagcaggacacatctgttcttcagctcaaacaagagctactgagggcaaatatggacaaagatgagctgcacaaccagaatgtggatctgcagaggaagctagatgagaggaaccggctcttgggagaatataaaaaagagctggggcagaaggatcgccttcttcagcagcaccaggccaagttagaagaagcactccggaaactctctgatgtcagttaccaccaggtggatctagagcgagagctagaacacaaagatgtcctcttggctcactgtatgaaaagagaggcagatgaggcgaccaactacaacagtcacaactctcaaagcaatggttttctccttccaacggcaggaaaaggagctacttcagtcagcaacagagggaccagcgacctgcagcttgttcgagatgctctccgcagcctgcgcaacagcttcagtggccacgatcctcagcaccacactattgacagcttggagcagggcatttctagcctcatggagcgcctgcatgttatggagacgcagaagaaacaagaaagaaaggttcgggtcaagtcacccagaactcaagtaggtagtgaataccgggagtcctggccccctaactcaaagttgcctcactcacagagctctccaactgtcagcagcacctgtactaaagtgctctatttcactgaccggtcacttacgcccttcatggtcaatataccaaagaggttggaggaggtgacgttaaaggattttaaagcagctattgatcgggaaggaaatcaccggtatcacttcaaagcactggatcctgagtttggcactgtcaaagaggagattttccatgatgatgatgccatccctggatgggaagggaaaattgtagcttgggtggaagaagaccatggagagaattaatgccaagtatcagattgagggcttatggaacctggtcactccctggctgcttcactcaggaaagggaactaaaaccagaatacactaagaagtttctagtttgtgtgccaaaacagaagcttctccaagcatgatggccacaggtcagtcctctttctgtgcctggcatatctggtacttaaaattctgtccaaatgtagaccatgggttcatctggagttccttgtccgtgggaacacagtgttctattctactctgaggacaacaaaccgaaggccttaaacgatggggatggatgatcccgcctctgtaggggcatggctgctattatctggaaattaggaattggatgcatcattcctgtgtgttacagtattattttaattggcctcaatggttgcagcaatcagagtcccagcgtttgtactcacagacaaggcaaaggtaccagcttttctgtttctttgaacctactgcaaaccaagaataactcatgaggtggtaccaaagatgaaagcccagacttcagtaatcttttgaaccagacgtggatggtgctgaattgttgcttggatggaaaaagggctgcccatgttgtgctacactatgctaaaactgtaatttagtaagaccttgggctgcctcttctgtcttaactggttctgcagcttgtccttttgcccacatagggcctatttcatgtactgttagttttctctggggactctttaactttagagccatttctttttcttcaaactgatgaacttttgtttgaaaggcataaggagtgaaaagctccttgaaaatccaggcgggtatggaaaggtgctgctacccatatctttttgactttctttgtttcatgactttaactcatggcatctcctttgtagtaaaaggagacagaccattaatttcagcatttctttgtgatttataagtactgagcatgaagtacttgtctgcccctcatttcaaggccagagttattttctatttatgtattagtctaggctgatcttttagggcacaatagaaaccatggggcgtggagcatgagttgtgaatggcagggatcattctgggtaaaaaaaacctagaatcatttctgatgtgcaacattgtcaagtgaagaagctaacagttcaactaccgagattatttgataacctgggttttctcattcatccatcaagcaccatcaaccagtcagccattattatttatatatgtattaccaaaagcagtctatctgcctgtgacctccaatgtacactgccaaacacaagagtaggacacatctgttctgggttcttgacctatctgtctccaattcatctccccttttcagccatttcaacaaactactctttggagctctgagatgacatcttgttgttttatatagatgtatcttttaaaaatagttcacgtttggagaattcttttgtactcatttgctttttgtctgagaaccatgtctatttttataactggagtgtgagttctgtatcttctcacattctgtatactgtatccattttctagagaacccagtagcttttatacagtctcttcttaccaccccttgtggtttcagaacaagctttattttattacgagtatattaatgacaactaattcctgttccaattctacctgttttagttgtgaaggtagttttgtgtaatccagttgattgctcctctggcagagagaaggagctcaaaagatacttgatgtctttcatgtaagtttacctggtcttttcctattgaagaatttttcatcagaaacgactgggaaagtttgggaaagtcagcaaaagaaagaatgcatttcgaaagcaaacagaagaaaaaagtatattctcacagtttttccccaggaagtctggagaaaaagtcctcatgtcaccaatttctctgttgcatgaattttagtgttttgctataagacagcatgagggctatcaggccaaaattcattattgtatttccaatacagtttgtcttgaatgtctgtctcttaaaccagtttttacttgtcagttttctctcagcaaacagtcttactattatgtggaatttaacttttcagagaaaatttccaaagtcctctaccttatttggcttttatctgtgtcttttggaaaaggagctgcatggcctcagtgcctccataaaaagcttaagttgagttcatgggagaacattaagatcgttttttttcccttttagctcggtaatctcatgtaccacaggtaatgaccaagcatctctgctagaggatgtaactctcataactcctgtgtaaaatgaggatcctgttggtgatcctcattccagtttccaaagcgagaggagccttctgagcagaagtatgcaagactgattctgtttggaacagtttcctatttggctgcattctaggaggcctcctgacttattcatagtattgtcgcctggtggcattggtgtggggtagcttgtcctgctacttgctaaagttctctttctttgagaaaactgaggaaccagaatgcttagagttcataaaataatctctaaaccatgttaggttaaaacaaaatgaccatctcacaaaaacgagtttagttgaatgctcaattccttacaaaatcttcatttaaggctgagtgtggtggctcatgcctgtaattccagcactttgggaggccgaggcaggaagactgcttgagcccaggagttcaagaccagcctgggcaacgtaggaagactccgtctctacatagaaattttattataaaagtagctggggatggtggcacacacctgtagtcccagctactcaggaggttgaggtgggaagattgcttgagcccaggagtttgaggttgcagtgagctgatcatgccactgcactctagcctaggctacagagcaggaccccatctccaaaaaaaaaaaaaaaaaagtcatttaaaaactgaagaatgttctcttcttgctcagttccctaaattagctggggggattgggatactttacaatttttacatttttaaatttgaagaatttgttttaaacttacttggtaatggcacttctacttactgaccaacttttcagctctttttgaccaggatggttgcaaattagggaaaatatctttatactatacatccaattcaagaggactttaattacttaaaagcatttaggtcataattaaaattattttcactgtttccataaaataagcattatgattgcacactccttctactgtctgaatttatgtaagaggtatagcttgcttaaaatacatatatatgtaaagttatattttcttagaaacatggatgtttacagccattgctttcaaagagattattactgtgtattctccctgttttacaatatgttttcatgaagactatgttacaccagaggcttctgattatcaaagtgataaccagttttaactgccggtatgtaccagatttgtgaactaatttaaaaaaccacaaactatgaataaaatggggtttgcaaactaaaaa

SEQ ID NO: 91 - DNA, 1815 bp, Homo sapiens
gcagagctctgtgctccctgcagtcaggactctgggaccgcagggggctcccggaccctgactctgcagccgaaccggcacggtttcgtggggacccaggcttgcaaagtgacggtcattttctctttctttctccctcttgagtccttctgagatgatggctctgggcgcagcgggagctacccgggtctttgtcgcgatggtagcggcggctctcggcggccaccctctgctgggagtgagcgccaccttgaactcggttctcaattccaacgctatcaagaacctgcccccaccgctgggcggcgctgcggggcacccaggctctgcagtcagcgccgcgccgggaatcctgtacccgggcgggaataagtaccagaccattgacaactaccagccgtacccgtgcgcagaggacgaggagtgcggcactgatgagtactgcgctagtcccacccgcggaggggacgcaggcgtgcaaatctgtctcgcctgcaggaagcgccgaaaacgctgcatgcgtcacgctatgtgctgccccgggaattactgcaaaaatggaatatgtgtgtcttctgatcaaaatcatttccgaggagaaattgaggaaaccatcactgaaagctttggtaatgatcatagcaccttggatgggtattccagaagaaccaccttgtcttcaaaaatgtatcacaccaaaggacaagaaggttctgtttgtctccggtcatcagactgtgcctcaggattgtgttgtgctagacacttctggtccaagatctgtaaacctgtcctgaaagaaggtcaagtgtgtaccaagcataggagaaaaggctctcatggactagaaatattccagcgttgttactgtggagaaggtctgtcttgccggatacagaaagatcaccatcaagccagtaattcttctaggcttcacacttgtcagagacactaaaccagctatccaaatgcagtgaactccttttatataatagatgctatgaaaaccttttatgaccttcatcaactcaatcctaaggatatacaagttctgtggtttcagttaagcattccaataacaccttccaaaaacctggagtgtaagagctttgtttctttatggaactcccctgtgattgcagtaaattactgtattgtaaattctcagtgtggcacttacctgtaaatgcaatgaaacttttaattatttttctaaaggtgctgcactgcctatttttcctcttgttatgtaaatttttgtacacattgattgttatcttgactgacaaatattctatattgaactgaagtaaatcatttcagcttatagttcttaaaagcataaccctttaccccatttaattctagagtctagaacgcaaggatctcttggaatgacaaatgataggtacctaaaatgtaacatgaaaatactagcttattttctgaaatgtactatcttaatgcttaaattatatttccctttaggctgtgatagtttttgaaataaaatttaacatttaatatcatgaaatgttataagtagacatacattttgggattgtgatcttagaggtttgtgtgtgtgtacgtatgtgtgtgttctacaagaacggaagtgtgatatgtttaaagatgatcagagaaaagacagtgtctaaatataagacaatattgatcagctctagaataactttaaagaaagacgtgttctgcattgataaactcaaatgatcatggcagaatgagagtgaatcttacattactactttcaaaaatagtttccaataaattaataatacctaaaaaaaaaaa

SEQ ID NO: 92 - DNA, 3659 bp, Homo sapiens
cgggagcccgcggcgagcgtagcgcaagtccgctccctaggcatcgctgcgctggcagcgattcgctgtctcttgtgagtcaggggacaacgcttcggggcaactgtgagtgcgcgtgtgggggacctcgattctcttcagatctcgaggattcggtccggggacgtctcctgatcccctactaaagcgcctgctaactttgaaaaggagcactgtgtcctgcaaagtttgacacataaaggataggaaaagagaggagagaaaagcaactgagttgaaggagaaggagctgatgcgggcctcctgatcaattaagaggagagttaaaccgccgagatcccggcgggaccaaggaggtgcggggcaagaaggaacggaagcggtgcgatccacagggctgggttttcttgcaccttgggtcacgcctccttggcgagaaagcgcctcgcatttgattgcttccagttattgcagaacttcctgtcctggtggagaagcgggtctcgcttgggttccgctaatttctgtcctgaggcgtgagactgagttcatagggtcctgggtccccgaaccaggaagggttgagggaacacaatctgcaagcccccgcgacccaagtgaggggccccgtgttggggtcctccctccctttgcattcccacccctccgggctttgcgtcttcctggggaccccctcgccgggagatggccgcgttgatgcggagcaaggattcgtcctgctgcctgctcctactggccgcggtgctgatggtggagagctcacagatcggcagttcgcgggccaaactcaactccatcaagtcctctctgggcggggagacgcctggtcaggccgccaatcgatctgcgggcatgtaccaaggactggcattcggcggcagtaagaagggcaaaaacctggggcaggcctacccttgtagcagtgataaggagtgtgaagttgggaggtattgccacagtccccaccaaggatcatcggcctgcatggtgtgtcggagaaaaaagaagcgctgccaccgagatggcatgtgctgccccagtacccgctgcaataatggcatctgtatcccagttactgaaagcatcttaacccctcacatcccggctctggatggtactcggcacagagatcgaaaccacggtcattactcaaaccatgacttgggatggcagaatctaggaagaccacacactaagatgtcacatataaaagggcatgaaggagacccctgcctacgatcatcagactgcattgaagggttttgctgtgctcgtcatttctggaccaaaatctgcaaaccagtgctccatcagggggaagtctgtaccaaacaacgcaagaagggttctcatgggctggaaattttccagcgttgcgactgtgcgaagggcctgtcttgcaaagtatggaaagatgccacctactcctccaaagccagactccatgtgtgtcagaaaatttgatcaccattgaggaacatcatcaattgcagactgtgaagttgtgtatttaatgcattatagcatggtggaaaataaggttcagatgcagaagaatggctaaaataagaaacgtgataagaatatagatgatcacaaaaagggagaaagaaaacatgaactgaatagattagaatgggtgacaaatgcagtgcagccagtgtttccattatgcaacttgtctatgtaaataatgtacacatttgtggaaaatgctattattaagagaacaagcacacagtggaaattactgatgagtagcatgtgactttccaagagtttaggttgtgctggaggagaggtttccttcagattgctgattgcttatacaaataacctacatgccagatttctattcaacgttagagtttaacaaaatactcctagaataacttgttatacaataggttctaaaaataaaattgctaaacaagaaatgaaaacatggagcattgttaatttacaacagaaaattaccttttgatttgtaacactacttctgctgttcaatcaagagtcttggtagataagaaaaaaatcagtcaatatttccaaataattgcaaaataatggccagttgtttaggaaggcctttaggaagacaaataaataacaaacaaacagccacaaatacttttttttcaaaattttagttttacctgtaattaataagaactgatacaagacaaaaacagttccttcagattctacggaatgacagtatatctctctttatcctatgtgattcctgctctgaatgcattatattttccaaactatacccataaattgtgactagtaaaatacttacacagagcagaattttcacagatggcaaaaaaatttaaagatgtccaatatatgtgggaaaagagctaacagagagatcattatttcttaaagattggccataacctgtattttgatagaattagattggtaaatacatgtattcatacatactctgtggtaatagagacttgagctggatctgtactgcactggagtaagcaagaaaattgggaaaactttttcgtttgttcaggttttggcaacacatagatcatatgtctgaggcacaagttggctgttcatctttgaaaccaggggatgcacagtctaaatgaatatctgcatgggatttgctatcataatatttactatgcagatgaattcagtgtgaggtcctgtgtccgtactatcctcaaattatttattttatagtgctgagatcctcaaataatctcaatttcaggaggtttcacaaaatggactcctgaagtagacagagtagtgaggtttcattgccctctataagcttctgactagccaatggcatcatccaattttcttcccaaacctctgcagcatctgctttattgccaaagggctagtttcggttttctgcagccattgcggttaaaaaatataagtaggataacttgtaaaacctgcatattgctaatctatagacaccacagtttctaaattctttgaaaccactttactactttttttaaacttaactcagttctaaatactttgtctggagcacaaaacaataaaaggttatcttatagtcgtgactttaaacttttgtagaccacaattcactttttagttttcttttacttaaatcccatctgcagtctcaaatttaagttctcccagtagagattgagtttgagcctgtatatctattaaaaatttcaacttcccacatatatttactaagatgattaagacttacattttctgcacaggtctgcaaaaacaaaaattataaactagtccatccaagaaccaaagtttgtataaacaggttgctataagcttggtgaaatgaaaatggaacatttcaatcaaacatttcctatataacaattattatatttacaatttggtttctgcaatatttttcttatgtccacccttttaaaaattattatttgaagtaatttatttacaggaaatgttaatgagatgtattttcttatagagatatttcttacagaaagctttgtagcagaatatatttgcagctattgactttgtaatttaggaaaaatgtataataagataaaatctattaaatttttctcctctaaaaactgaaaaaaaaaaaaaaaaaaaaaaaa

SEQ ID NO: 93 - DNA, 2755 bp, Homo sapiens
ggcggagagggagcctggtgggcgggcggggcgcgtcttgcgggctccctcgggtaccggcgctgccgcaccccgccgcgctcccgcacccgcggcccgcccaccgcgccgctcccgcatctgcacccgcagcccggcggcctcccggcgggagcgagcagatccagtccggcccgcagcgcaactcggtccagtcggggcggcggctgcgggcgcagagcggagatgcagcggcttggggccaccctgctgtgcctgctgctggcggcggcggtccccacggcccccgcgcccgctccgacggcgacctcggctccagtcaagcccggcccggctctcagctacccgcaggaggaggccaccctcaatgagatgttccgcgaggttgaggaactgatggaggacacgcagcacaaattgcgcagcgcggtggaagagatggaggcagaagaagctgctgctaaagcatcatcagaagtgaacctggcaaacttacctcccagctatcacaatgagaccaacacagacacgaaggttggaaataataccatccatgtgcaccgagaaattcacaagataaccaacaaccagactggacaaatggtcttttcagagacagttatcacatctgtgggagacgaagaaggcagaaggagccacgagtgcatcatcgacgaggactgtgggcccagcatgtactgccagtttgccagcttccagtacacctgccagccatgccggggccagaggatgctctgcacccgggacagtgagtgctgtggagaccagctgtgtgtctggggtcactgcaccaaaatggccaccaggggcagcaatgggaccatctgtgacaaccagagggactgccagccggggctgtgctgtgccttccagagaggcctgctgttccctgtgtgcacacccctgcccgtggagggcgagctttgccatgaccccgccagccggcttctggacctcatcacctgggagctagagcctgatggagccttggaccgatgcccttgtgccagtggcctcctctgccagccccacagccacagcctggtgtatgtgtgcaagccgaccttcgtggggagccgtgaccaagatggggagatcctgctgcccagagaggtccccgatgagtatgaagttggcagcttcatggaggaggtgcgccaggagctggaggacctggagaggagcctgactgaagagatggcgctgagggagcctgcggctgccgccgctgcactgctgggaggggaagagatttagatctggaccaggctgtgggtagatgtgcaatagaaatagctaatttatttccccaggtgtgtgctttaggcgtgggctgaccaggcttcttcctacatcttcttcccagtaagtttcccctctggcttgacagcatgaggtgttgtgcatttgttcagctcccccaggctgttctccaggcttcacagtctggtgcttgggagagtcaggcagggttaaactgcaggagcagtttgccacccctgtccagattattggctgctttgcctctaccagttggcagacagccgtttgttctacatggctttgataattgtttgaggggaggagatggaaacaatgtggagtctccctctgattggttttggggaaatgtggagaagagtgccctgctttgcaaacatcaacctggcaaaaatgcaacaaatgaattttccacgcagttctttccatgggcataggtaagctgtgccttcagctgttgcagatgaaatgttctgttcaccctgcattacatgtgtttattcatccagcagtgttgctcagctcctacctctgtgccagggcagcattttcatatccaagatcaattccctctctcagcacagcctggggagggggtcattgttctcctcgtccatcagggatctcagaggctcagagactgcaagctgcttgcccaagtcacacagctagtgaagaccagagcagtttcatctggttgtgactctaagctcagtgctctctccactaccccacaccagccttggtgccaccaaaagtgctccccaaaaggaaggagaatgggatttttcttttgaggcatgcacatctggaattaaggtcaaactaattctcacatccctctaaaagtaaactactgttaggaacagcagtgttctcacagtgtggggcagccgtccttctaatgaagacaatgatattgacactgtccctctttggcagttgcattagtaactttgaaaggtatatgactgagcgtagcatacaggttaacctgcagaaacagtacttaggtaattgtagggcgaggattataaatgaaatttgcaaaatcacttagcagcaactgaagacaattatcaaccacgtggagaaaatcaaaccgagcagggctgtgtgaaacatggttgtaatatgcgactgcgaacactgaactctacgccactccacaaatgatgttttcaggtgtcatggactgttgccaccatgtattcatccagagttcttaaagtttaaagttgcacatgattgtataagcatgctttctttgagttttaaattatgtataaacataagttgcatttagaaatcaagcataaatcacttcaactgctcttctgtagttcttggatttcttttcccttttgactttgaataaatgtaaaatcctttcagccagaaaaagtaaaatagaaacaacctgtattaaaaatcttccatagaaaaaaaaaaa

SEQ ID NO: 94 - DNA, 835 bp, Homo sapiens
cagacgacgtgctgagctgccagcttagtggaagctctgctctgggtggagagcagcctcgctttggtgacgcacagtgctgggaccctccaggagccccgggattgaaggatggtggcggccgtcctgctggggctgagctggctctgctctcccctgggagctctggtcctggacttcaacaacatcaggagctctgctgacctgcatggggcccggaagggctcacagtgcctgtctgacacggactgcaataccagaaagttctgcctccagccccgcgatgagaagccgttctgtgctacatgtcgtgggttgcggaggaggtgccagcgagatgccatgtgctgccctgggacactctgtgtgaacgatgtttgtactacgatggaagatgcaaccccaatattagaaaggcagcttgatgagcaagatggcacacatgcagaaggaacaactgggcacccagtccaggaaaaccaacccaaaaggaagccaagtattaagaaatcacaaggcaggaagggacaagagggagaaagttgtctgagaacttttgactgtggccctggactttgctgtgctcgtcatttttggacgaaaatttgtaagccagtccttttggagggacaggtctgctccagaagagggcataaagacactgctcaagctccagaaatcttccagcgttgcgactgtggccctggactactgtgtcgaagccaattgaccagcaatcggcagcatgctcgattaagagtatgccaaaaaatagaaaagctataaatatttcaaaataaagaagaatccacattgcaaaaaaaaaaaaaaaaaa

SEQ ID NO: 95 - DNA, 1034 bp, Homo sapiens
ccgggctcctgggtgaggccggcaagtttggagcgtggtcagacaataggggcgtggctacggctcgcggagcgcaaccaacgctctagaccagacctgggctcgagaccataactgtttggctttaacagtacgtgggcggccggaatccgggagtccggtgacccgggctgtggtctagcataaaggcggagcccagaagaaggggcggggtatgggagaagcctccccacctgcccccgcaaggcggcatctgctggtcctgctgctgctcctctctaccctggtgatcccctccgctgcagctcctatccatgatgctgacgcccaagagagctccttgggtctcacaggcctccagagcctactccaaggcttcagccgacttttcctgaaaggtaacctgcttcggggcatagacagcttattctctgcccccatggacttccggggcctccctgggaactaccacaaagaggagaaccaggagcaccagctggggaacaacaccctctccagccacctccagatcgacaagatgaccgacaacaagacaggagaggtgctgatctccgagaatgtggtggcatccattcaaccagcggaggggagcttcgagggtgatttgaaggtacccaggatggaggagaaggaggccctggtacccatccagaaggccacggacagcttccacacagaactccatccccgggtggccttctggatcattaagctgccacggcggaggtcccaccaggatgccctggagggcggccactggctcagcgagaagcgacaccgcctgcaggccatccgggatggactccgcaaggggacccacaaggacgtcctagaagaggggaccgagagctcctcccactccaggctgtccccccgaaagacccacttactgtacatcctcaggccctctcggcagctgtaggggtggggaccggggagcacctgcctgtagcccccatcagaccctgccccaagcaccatatggaaataaagttctttcttacatctaaaaa

SEQ ID NO: 96 - DNA, 1098 bp, Homo sapiens
taatcccagctactcgggaggctgaggcaggagaattgcttgaacccgggtggtgggggttccagtgagctgagactgtgccaaacagtccgtgggcggccagagtcctggagtgcagtgaccaggctgttgtctagcataaaggcggagcccagaagaaggggcgtggggtggaagaaacctccctcactccccccgcaatgcggcatccgctggtcctgctgctgctcctctctgccctggtgacctccttcactgcagcctctatccacgatgctcatgcccaagagagctccttgggtcttacaggcctccagagcctactccaaggcttcagccgacttttcctgaaagatgacctgcttcggggcatagacagcttcttctctgcccccatggacttccggggcctccctaggaactaccaacaagaggagaacgaggagcaccagctgaggaacaacaccctctccagccacctccatattgacaaggtgaccgacaataagacaggagaggtgctgatctccgagaaggtggtggcatccatccagccggcggaggggagcttcgagggtaactggaaggtacccaggatggagtaggcggcggccctggtgtccatccggaaggctatggacaacttccatgcagagctccatccccgggtggccttctggatcatgaagctgccacggtggaggtcccaccacaatgtcctggagggcggccgctggctcagtgagaagcgacaccgcctgcaggccatccaggatgggctccacgaggggacccgcgaggacgtcctaaaagaggggacccagggctcctcccactccgggctgtcctccgaaagacccacttactgtacatcttcaggctttcctggcagctataggggttgggaccggggagcacctgtctgtagcccccatcaggccccgccccaagcagcatatggaaataaagttcttttcttacatctaaaaaaatttttaaaattaaaaaattgcccaaacagtttatgcctcactgcctgattagaaagacagaaatgtattttattacctgcgttttatataattaagtagtatctcc

SEQ ID NO: 97 - DNA, 6751 bp, Homo sapiens
gaatggaaaatggcggcctagacgcggagtttcctgcccgacccgcggcggctccggcggcgccatgacgcgctgggtgcccaccaagcgcgaggagaagtacggcgtggctttttataactatgatgccagaggagcggatgaactttctttacagatcggagacactgtgcacatcttagaaacatatgaagggtggtaccgaggttacacgttacgaaaaaagtctaagaagggtatatttcctgcttcatatattcatcttaaagaagcgatagttgaaggaaaagggcaacatgaaacagtcatcccgggtgacctccccctcatccaggaagtcaccacgacactccgagagtggtccaccatctggaggcagctctacgtgcaagataacagggagatgtttcgaagtgtgcggcacatgatctatgaccttattgaatggcgatcacaaattctttctggaactctgcctcaggatgaactcaaagaactgaagaagaaggtcacagccaaaattgattatggaaacagaattctagatttggacctggtggttagagatgaagatgggaatattttggatccagaattaactagcacgattagtctcttcagagctcatgaaatagcttctaaacaagtggaggaaaggttacaagaggaaaaatctcaaaagcagaacatagatattaacagacaagccaagtttgctgcaaccccttctctggccttgtttgtgaacctcaaaaatgtggtttgtaaaataggagaagatgctgaagtcctcatgtctctatatgaccctgtggagtccaaattcatcagtgagaactacctggttcgctggtccagttcaggattacctaaagacatagacagattacataatttgcgagccgtgtttactgacctcggaagcaaagacctgaaaagggagaaaatcagttttgtctgtcagattgttcgcgtgggtcgcatggagctgagggacaacaacaccaggaaactgacctcggggttgcggcgaccttttggagtggctgtgatggatgtaacagatataataaatggaaaagtagatgatgaagataagcagcatttcattccctttcagccggtggcaggggagaatgacttccttcagactgttataaacaaagtcatcgctgccaaagaagtcaaccacaaggggcagggtttgtgggtaacattgaaattacttcctggagatatccatcagatccgaaaagagtttccgcatttagtggacaggaccacagctgtggctcgaaaaacagggtttccggagataatcatgcctggtgatgttcgaaatgatatctatgtaacattagttcaaggagattttgataaaggaagcaaaacaacagcgaagaacgtggaggtcacggtgtctgtgtacgatgaggatgggaaacgattagagcatgtgattttcccgggtgctggtgatgaagcgatttcagagtacaaatctgtgatttactaccaagtaaagcagccacgctggtttgagactgttaaggtggccattcccatcgaggacgttaaccgcagtcaccttcggtttaccttccgccacaggtcatcacaggactctaaggataaatctgagaaaatatttgcactagcatttgtcaagctgatgagatacgatggtaccaccctgcgagacggagagcacgatcttatcgtctataaggccgaagcaaagaagctggaagatgctgccacgtacttgagtctgccctccacgaaggcagagttggaagaaaagggccactcggccaccggcaagagcatgcagagccttgggagctgcaccattagcaaggactccttccagatctccacgctcgtgtgctccaccaaactgactcagaacgtggaccttctggggctcttgaaatggcgctccaacaccagcctgctgcagcagaacttgaggcagctgatgaaagtcgatggtggtgaagtagtgaagtttcttcaggacacgttggatgccctcttcaacatcatgatggagaactcagagagtgagacttttgacacgttagtctttgatgctctggtatttatcattggactgattgctgatagaaaatttcagcattttaatcctgttttggaaacttacattaagaaacactttagtgcaacgttagcctacacgaagttgacaaaagtgttgaagaactacgtggacggtgctgagaagccgggagtaaatgagcagctgtacaaagccatgaaagcgctagaatccatcttcaagttcatcgtgcgctccaggatcctgttcaatcaactgtatgaaaacaagggagaggctgacttcgtggaatctttgctgcagctcttcaggtccatcaatgacatgatgagcagcatgtcagaccagaccgtccgggtgaagggggcagcactgaaatacttaccaacgatcgtcaacgatgtgaaattggtgtttgatcccaaagagctcagcaaaatgtttactgaattcatcctcaatgttcccatgggcttgctgaccatccagaaactctactgcttgatcgaaatcgtccacagtgacctcttcacacagcatgactgcagagagatcctgcttcccatgatgaccgatcagctcaagtaccatctggagagacaggaggacctggaggcctgctgtcagctgctcagccacatcctggaggtgctgtacaggaaggacgtggggccaacccagaggcacgtccagattatcatggagaaacttctccggaccgtgaaccgaaccgtcatttccatgggacgagattctgaactcattggaaacttcgtggcttgcatgacagctattttacgacaaatggaagattaccattatgcccacttgatcaagacttttgggaaaatgaggactgatgtggtagatttcctaatggaaacattcatcatgtttaagaacctcattggaaagaacgtttaccccttcgactgggtgatcatgaacatggtgcaaaataaagtcttcctgcgagcaattaatcagtatgcagatatgctgaacaaaaaatttctggatcaagccaactttgagctacagctgtggaacaactactttcacctggctgttgctttccttactcaagagtccctgcaactggagaatttttcaagtgccaagagagccaaaatccttaacaagtacggagatatgaggagacagattggctttgaaatcagagacatgtggtacaaccttggtcaacacaagataaagttcattccagaaatggtgggcccaatattagaaatgacattaattcccgagacggagctgcgcaaagccaccatccccatcttctttgatatgatgcagtgtgaattccattcgacccgaagcttccaaatgtttgaaaatgagatcatcaccaagctggatcatgaagtcgaaggaggcagaggagacgaacagtacaaagtgttatttgataaaatccttctggaacactgcaggaagcacaaatacctcgccaaaacaggagaaacttttgtaaaactcgttgtgcgcttaatggaaaggcttttggattatagaaccatcatgcacgacgagaacaaagaaaaccgcatgagctgcaccgtcaatgtgctgaatttctacaaagaaattgaaagagaagaaatgtatataaggtatttgtacaagctctgtgacctgcacaaggagtgtgataactacaccgaagcggcttacaccttgcttctccatgcaaagcttcttaagtggtcggaggatgtgtgtgtggcccacctcacccagcgggacgggtaccaggccaccacgcagggacagctgaaggagcagctctaccaggaaatcatccactacttcgacaaaggcaagatgtgggaggaggccattgccttgggcaaggagctagccgagcagtatgagaacgaaatgtttgattatgagcaactcagcgaattgctgaaaaaacaggctcagttttatgaaaacatcgtcaaagtgatcaggcccaagcctgactattttgctgttggctactacggacaagggttccccacattcctgcggggaaaagttttcatttaccgagggaaagagtatgagcgccgggaagattttgaggctcggctcttaactcagtttccaaacgccgagaaaatgaagacaacatctccaccaggcgacgatattaaaaactctcctggccagtatattcagtgcttcacagtgaagcccaaactcgatctgcctcctaagtttcacaggccagtgtcagagcagattgtaagtttttacagggtgaacgaggtccagcgatttgaatattctcggccaatccggaagggagagaaaaacccagacaatgaatttgcgaatatgtggatcgagagaaccatatatacaactgcatataaattacctggaattttaaggtggtttgaggtcaagtctgttttcatggtggaaatcagccccctggagaatgccattgagaccatgcagctgacgaacgacaagatcaacagcatggtgcagcagcacctggatgaccccagcctgcccatcaacccgctctccatgctcctgaacggcatcgtggacccagctgtcatggggggcttcgcaaactacgaaaaggccttctttacagaccggtacctgcaggagcaccctgaggcccatgaaaagatcgagaagctcaaggacctgattgcttggcagattccttttctggccgaagggatcagaatccatggagacaaagtcacggaggcactgaggccgttccacgagaggatggaggcctgtttcaaacagctgaaggaaaaggtggagaaagagtacggcgtccgaatcatgccctcaagtctggatgatagaagaggcagccgcccccggtccatggtgcggtccttcacgatgccttcctcatcccgccctctgtctgtggcctctgtctcttccctctcatcggacagcaccccttccagaccaggctccgacgggtttgccctggagcctctcctgccaaagaaaatgcactccaggtcccaggacaagctggacaaggatgacctggagaaggagaagaaggacaagaagaaggaaaaaaggaacagcaaacatcaagagatatttgagaaagaatttaaacccaccgacatttccctgcagcagtctgaggctgtgatcctttcggaaacgataagtcccctgcggccccagagaccgaagagccaggtgatgaacgtcattggaagcgaaaggcgcttctcggtgtccccctcgtcaccgtcctcccagcaaacaccccctccagttacaccaagggccaagctcagcttcagcatgcagtcgagcttggagctgaacggcatgacgggggcggacgtggccgatgtcccaccccctctgcctctcaaaggcagcgtggcagattacgggaatttgatggaaaaccaggacttgctgggctcgccaacacctccacctccccctccacaccagaggcatctgccacctccactgcccagcaaaactccgcctcctccccctccaaagacaactcgcaagcagacatcggtggactccgggatcgtgcagtgacgtcgcaagcctctctggaaagagtgtgctgcccctccccatctccatgccctctccttctgtgtcccctgagtctgctgtttacctcattgggcctgtgatgttaacatttcgtgcgactgctttttcttcaaaggagttcagttctcaccatggagtgagtggcctttagcgtcatggagcaaggtgggtctgggaggtagatatgggtccgggatgtgctatcgtagttatcagagttgggggcctctgagtgtgtctggctctgagagagtctgagtcttgcccaaacattctttctttttgtgccaaatgacttgcatttgcaaagagctcaattgctctgagctcagccaagtaggagaggctaggccatcactcttaggaagctgtgtagtgatgatgtataagaatcctcctcactgtcatgggatgttgtatccagcccctccttgttccagccggtggtgtgacttcgttggttgaggtgtgtctccaacctacatcagaccatgaagttcaacccctccagggaagctcctgatttcccctgcataattgaaaataggatatttctcagctattgaacagttactaatttatggggtggaaacagcattaagaatactgaatcaaatggaaaaacaaatgaatacaggaagataagtgttcgttcttttctgaaaaagagtatgtgtaccacaagagctggttttaattgggtgaattgtttttgtcctcattctgtacagaaatttgtatatatgatggttcttagaacttgttttaatttttgtggtccttccgtttattataataggcgtccaccaatgattatccatatgtgttcttaatttttaactgctggaagtgttaaaacacacacacacacacacacacattttttttttgagaactccaaagtcctgaaaattttggtggacaatgatttttaaaaaactaactttgtataacctaatatttgtattctctcatctatatttttttattcactataatcatgatactcttctaatagacttaaaagttaatcattgacaacgaaaaataaaatgttattttaaaaga

SEQ ID NO: 98 - DNA, 1746 bp, Homo sapiens
gggaagctcccctccgagactctggatagccgccgggggggcgttgcctggccggctggttgcgtagcaacggcaggcggtgcgtgacgtgcgcagccgcgttccgtcctgaggcgcgcccgccccggggtaagctcgcgccgccgcgtcagctcagcgctgggtctctcggtcccgcagccgtgaggaggacggtctgcatactcgctgcccgccggctccctcccccgcgtccctgcgaccgccgcggcgaagatgattttcagttcacccactagaggcaaagacgtaagagagctaccagcgtattgagaggagatacacaggcactacgagaatggagtttagaagaaggtcagagccctgggcagtgttgggccaggctttagggcctcaggagtgcaagtagctgatgaagtatgtcgcattttttatgacatgaaagttcgtaaatgctccacaccagaagaaatcaagaaaagaaagaaggctgtcattttttgtctcagtgcagacaaaaagtgcatcattgtagaagaaggcaaagagatcttggttggagatgttggtgtaaccataactgatcctttcaagcattttgtgggaatgcttcctgaaaaagattgtcgctatgctttgtatgatgcaagctttgaaacaaaagaatccagaaaagaagagttgatgttttttttgtgggcaccagaactagcacctctgaaaagtaaaatgatctatgcaagctccaaggatgcaattaaaaagaaatttcaaggcataaaacatgaatgtcaagcaaatggaccagaagatctcaatcgggcttgtattgctgaaaagttaggtggatccttaattgtagcctttgaaggatgccctgtgtagattattcagtgccacaaattgaaagcttccatgtttaatgttatcctcttgctatataaataaagcaaatatatttaggccagggtctcactgagggggagctgtcttgtcatcttttagagtaaactattctataaacatatgcaaacagccctaaataaatctaaagtctaaagttttattgatgtgaaattaaattcttattggccaaatgcctgttttgatgagttgatttataaagatttttgttaagctcaggattttaaattacacagttcacaaacagtaaaggccatgtgaagagaattattacatctttattaacctcagcatttactttgtttcttttgcttaggaaattgctcataatctggttataattttggtccaaattctttattcttccttgagctaagcagaataatggaatataatatgtcttcataatataacaacactaatacactaatagtaagattaagttaggcagtcttctaccaaatgtgtaatggagattgcctcaaaattgtgtccacataatccacgctcatcttgcaaagcgctatttcaggcacatcattggaatacaggaagtagccctgcacctgccagtgagctcgccattcactgattggaagagtgacctggcatcttggaaatcattgtgtgtcttcaggagaatgtgcagtgtcttgtaacaactaattataatgcaaattagggctacattgtaatctgctttgttaatgaaaatgataaaacagaatattgacaagctaggacacctgtggtatctttaattgtatctccttcagaagtttgcttcttatggtataataaagtatggaagaatattgagta

SEQ ID NO: 99 - DNA, 2266 bp, Homo sapiens
gagccccgggccgggccctgagcgcgcgggctccgcgccgccgccgcgccatggcggagaccaagattatctaccacatggacgaggaggagacgccgtacctggtcaagctgcccgtggcccccgagcgcgtcacgctggccgacttcaagaacgtgctcagcaaccggcccgtgcacgcctacaaattcttctttaagtccatggaccaggacttcggggtggtgaaggaggagatctttgatgacaatgccaagcttccctgcttcaacggccgcgtggtctcctggctggtcctggctgagggtgctcactcggatgcggggtcccagggcacggacagccacacagacctgcccccgcctcttgagcggacaggcggcatcggggactcccggcccccctccttccacccaaatgtggccagcagccgtgacgggatggacaacgagacaggcacggagtccatggtcagtcaccggcgggagcgtgcccgacgccggaaccgcgaggaggccgcccggaccaatgggcacccaaggggagaccgacggcgggatgtggggctgcccccagacagcgcgtccaccgccctcagcagcgagcttgagtccagcagctttgtggactcggacgaggatggcagcacgagcaggctcagcagctccacggagcagagcacctcatccagactcacccggaagtacgccagcagcttgctgaagcacggcttcctgcggcacacggtcaacaagatcaccttctccgagcagtgctactacgtcttcggggatctctgcagcaatctcgccaccctgaacctcaacagtggctccagtgggacttcggatcaggacacgctggccccgctgccccacccggctgccccctggcctctgggtcagggctacccctaccagtacccgggacccccaccctgcttcccgcctgcctaccaggacccgggctttagctatggcagcggcagcaccgggagtcagcagagtgaagggagcaaaagcagtgggtccacccggagcagccgccgggccccgggccgtgagaaggagcgtcgggcggcgggagctgggggcagtggcagtgaatcggatcacacggcaccgagtggggtggggagcagctggcgagagcgtccggccggccagctcagccgtggcagcagcccacgcagtcaggcctcggctaccgccccggggctccccccgccccaccccacgaccaaggcctatacagtggtgggggggccacccgggggaccccctgtccgggagctggctgccgtccccccggaattgacaggcagccgccagtccttccagaaggctatggggaacccctgcgagttcttcgtggacatcatgtgactcgtggcgcatgccccagccctgcctgaggtggggagctggcggtcctgccgcatgcagagctcgcgtgggcttgccttcgtgggggccaggacgggaggcagggtggggggcaggctggaccaccaccatctgccctggcagcctggctgctccagctcctgacagcacctgtgtctgagcagccgtgttgggggcgctccctctctgcccctcagcgagagcctcggacctcccaaccccttgtgtctggtggggatccctcctgggatgaggaagaccccctcgggctctcggctgacccccacctcctgcacagctgtgcccaggcccccagggtggtccatgcggggcaaccccctgcggtgcacaggccccctgtctggagtagggatctaatttatttatttattgcctggccggtgactcgggggaggaggcgaccctgtcatctgtcccacctgctgctgccccttggagcagcctgcaccttctctcctcccatccggcaacagtctgaaagtacgtggaggacgggaccggaagacgagagagggctggacatcctgcccaccgtgtcccagccagggcagggagggaccatggcccgcagggtcaaggggccccgatgtgcacagctgccacagggagggaggtcttggggagatgggcagtcaggtggcccgtccttggtgagtgcacacactgcgcgcacacatcgcggccttcctggcttctctggcccccacgtgtctgtgctgtagatactgtatcaaagtcccagcgtttagatggttaacatagagctgcttctgtgtaaatgctgcttattttaaacactaaaaagcgtttaattttatgggaaaaaaaaaaaaaaaaaa

SEQ ID NO: 100 - DNA, 223 bp, Homo sapiens
ggaagaagagagagggctagacatcctaccccctgcgtcccagccagggcagggagggaccgtggcccatggggtcaaaggggccccgatgtgcacagctgccgcagggagggaggtcttggggaaatgggcggtcagctggcctgtccttggtaattgcacacactgcccgcacacaccacggcccacacacaacgcggccttcctggcatctctggccccc

SEQ ID NO: 101 - DNA, 3046 bp, Homo sapiens
agtcacgtgacatgaggagaggtgggcgggtacctggaggaagctcgcggcgtcggtggcggtggcgcgcggcggccgctgagaccggggctttgagtcgcaccccgcggcccgccccccgccgccaccctcgcagatccgtgctttttcccctttgcttctctcccgtactgggtcagtcctgtccgcgctcgcgcgtcggtttgcgggtgtgcgcaggcgcggcaggggccattagccctttgggtgggcggtggagcccgggagcgcgcgggcgagaccatggcgggtagcagcactgggggcggtggggttggggagacgaaggtgatttaccacctggatgaggaagagactccctacctggtgaagatccctgtccccgccgagcgcatcaccctcggcgatttcaagagcgtcctgcagcggcccgcgggcgccaagtactttttcaagtctatggatcaggatttcggggtggtgaaggaagaaatttcagatgacaacgcccgcctcccctgcttcaacggaagggtggtatcctggctggtgtcctcagataatccccaacccgagatggcccctccagtccatgagcctcgggcagaactggcgcctccagccccacctttacctcctttgccacccgagaggaccagcggcattggggactcaaggcctccatccttccaccctaatgtgtccagcagccatgagaatctggagcctgagacagaaaccgagtcagtagtgtcactgaggcgggagcggcctcgcaggagagacagcagtgagcatggcgctgggggccacaggactggtggcccctcaaggctggagcgccacctggccggatacgagagctcctctaccctcatgaccagcgagctggagagtaccagcctgggggactcggacgaggaggacaccatgagcaggttcagcagctccacggagcagagcagtgcctcccgcctccttaagcgccaccggcggcgaaggaagcagaggccaccccgcctggagaggacgtcatccttcagcagcgtcacagattccacaatgtctctcaatatcatcacagtcacgctaaacatggagaagtacaacttcctgggtatctccattgttggccagagcaatgagcggggagacggaggcatctacattggctccatcatgaagggtggggctgtggcggccgacgggcgcattgagccaggggacatgcttttgcaggtgaatgacatgaactttgagaacatgagcaacgatgacgctgtgcgggtgctgagggacattgtgcacaagcctggccccattgtgctgactgtggccaagtgctgggatccctctcctcaggcctatttcactctcccccgaaatgagcccatccagccaattgaccctgctgcctgggtgtcccattccgcggctctgactggcaccttcccagcctatccaggttcctcctccatgagcaccattacatctggatcgtctttgcctgatggctgtgaaggccggggtctctccgtccatacggacatggcatcggtgaccaaggccatggcagctccagagtctggactggaagtccgggaccgcatgtggctcaagatcaccatccctaatgcctttctgggctcggatgtggttgactggctctaccatcacgtggagggctttcctgagcggcgggaggcccgcaagtatgccagcgggctgctcaaagcaggcctgatccgacacaccgtcaacaagatcaccttctctgagcagtgctattacgtcttcggagacctcagtggtggctgtgagagctacctagtcaacctgtctctcaatgacaacgatggctccagtggggcttcagaccaggataccctggctcctctgcctggggccaccccctggcccctgctgcccactttctcctaccaataccctgccccacacccctacagcccgcagcctccaccctaccatgagctttcatcttacacctatggtgggggcagtgccagcagccagcatagtgagggcagccggagcagtgggtcgacacggagtgatgggggggcagggcgcacggggaggcccgaggagcgggcccccgagtccaagtccggcagtggcagtgagtctgagccctccagccgagggggcagccttcggcggggtggggaagcaagtgggactagcgatgggggccctcctccatccagaggctcaactgggggtgcccctaatctccgagcccacccagggctccatccctatggaccgccccctggcatggccctcccctacaaccccatgatggtggtcatgatgcccccacctccacctccagtccctccagcagtgcagcctccgggggcccctccagtcagagacctgggctctgtgcccccagaactgacagccagccgccaaagcttccacatggccatgggcaatcccagcgagttctttgtggatgttatgtagcccactgtggggccaggctgggccgggcgctcctggtgtgtgactgggtgtcctggccgtcatgtgcttgctcttacagtgcctgggctcagcctaccagctgctgccatacaggagattgtggccactgtgactctcaccagcagtgcctggttcctcccccttccctcaggggtagacaagggacctttgattatttttagctttgtttttttataagcctttttgggggttaaaatagagtttcttacatttttgggacttttttaataggcatttcctcttttatatgaagaattcccatccattgggccccttctaaccccagaatgtgacctcctcctccagttacccacagccctgccctttgcagggttgggggtggtcagcggtaccccggggttaggcatcctagacagcagcctgaggaagctgggagatttgggccatgtagctgcctttgttactctatttattttagtcacttgtataaaacaccaaataaagcaatagaggcaaactcaaaaaaaaaaaaaaaaaaaaaaaaaaaaaa

SEQ ID NO: 102 - DNA, 5062 bp, Homo sapiens
gaacaagggagctggcgccgccagcagccgccgagctgggttgagccgctgggccgcgccgcgcgccgccgccgtctgggaggctcggcccggccgcccgagcaggccgcgcgcgggccgccgggcccgaggccagagccatgggcgagaccaagatcatctaccacttggatgggcaggagacgccgtaccttgtgaagctgcccctgcccgccgagcgcgtcaccttggcggactttaagggcgttttgcagcgacccagctataagttcttcttcaagtctatggacgacgatttcggagtggtgaaggaggagatctcggatgacaatgccaagctaccatgcttcaatggccgggtggtgtcctggctggtgtcagctgagggctcacacccagacccagcccccttctgtgctgataacccatcggagctgccaccacctatggagcgcacgggaggcatcggggactcccgacccccatccttccaccctcatgctggtgggggcagccaggagaacctggacaatgacacagagacggactctttggtgtctgcccagcgagagcggccacgccggagggatggcccagagcatgcaacccggctaaatggaactgcgaagggggaacggcggcgagaaccagggggttatgatagctcatccacccttatgagcagtgagctggagaccaccagcttctttgactcagatgaggatgactccaccagcaggttcagcagctccacagaacagagcagtgcctcacgcctgatgagaagacacaagcggcggcggcggaagcagaaggtttctcggattgagcggtcctcgtccttcagcagcatcacggactccaccatgtcactcaacatcatcacggtcactctcaacatggaaaaatataacttcttgggcatctccattgtgggccaaagcaacgagcgtggtgacggcggcatctacattggctctatcatgaagggtggggccgtggctgctgatggacgcatcgagccaggagatatgttgttacaggtaaacgagatcaactttgagaacatgagtaatgacgatgcagtccgggtactgcgggagattgtgcacaaaccggggcccatcaccctgactgtagccaagtgctgggacccaagtccacgtggttgcttcacattgcccaggagcgagcccatccggcccattgaccctgcggcctgggtctcccacactgcagccatgaccggcaccttccctgcatacggcatgagcccctccctgagcaccatcacctccaccagctcctccatcaccagttccatccctgacacagagcgcctagacgacttccacttgtccatccacagtgacatggctgccatcgtaaaagccatggcctcccctgaatcagggttggaggtccgtgaccgcatgtggctcaagattaccatccctaatgctttcatcggctcagatgtggtggactggctgtaccacaatgtggaaggcttcacggaccggagggaggcccgcaagtatgccagcaacctgctgaaagctggcttcatccgccataccgtcaacaagatcaccttctccgagcagtgctactacatcttcggtgacctctgcggcaacatggccaacctgtctctccacgatcacgatggctccagtggcgcctctgaccaggacacactggcccctttgccgcacccgggggccgccccttggcccatggctttcccgtaccagtacccgccacccccgcacccatacaacccgcacccgggcttcccggagctgggctacagctacggcgggggcagcgccagcagtcagcacagcgaaggcagtcggagcagtggctccaaccgtagcggcagcgatcggaggaaggagaaggacccgaaggccggggactccaagtccgggggcagcggcagcgaatcggaccacaccacacgcagcagcctgcgggggccgcgggagcgggcgcccagcgagcgctcagggccggcggccagcgagcacagccaccgcagccaccattccctggccagcagccttcgcagccaccacacacacccgagctacggtcctcccggagtgccccctctctacggcccccccatgctgatgatgcccccgccgcccgcggccatggggcccccaggagcccctccgggccgcgacctggcctcagtgcccccggaactgaccgccagcagacagtccttccgcatggccatgggaaaccccagtgagttctttgtggatgtgatgtgagcagggcccctcccccagctccattccgctcccaccccagccggctgcgttcctctctccatccgtccgtcttttttactttgtctggtacctgaaagggaaataaaaggaactaaatccaggtgcgctaactgctcgcagggtgctgcgagggtggggtgcacctaccgattggctctgcagccccctaacctgcctctggccccagttcgtttcctctgcccactaatccctgcgcaggacttcccaggaccccttttgtctctgggaccagacttgttggtgctaccccttactcccctctgcaacccccattttgggagttgaccccagcaatgaccttggtggcacgctcactccctcattctctcgtttcccctttagctccctttcaccatttattcagctacatcatccctctattaaccccaccccatcaggcacgtgtgcaaacctcttgactttaccccacattactgaaaccaaaatatatttgcttcatctgcccctactaaccatccccctgcctgctgcctcagtcctgcaacctaaagctgtagtcgcctccaatagccatccatgccatccctgcctgtgcctagatcagaggcccagagggccccctcagttgcctgagcagctggtggcttccagggagcatctctgctctacccctgccccatgcctgccctgcgtgctggttccttcagacccctaaccctactaaccagcaggctcatctcacctccaggcctgaaacatttcttttctttcttttttcctcccccaatttaccctgggcctggagcagccaagaatttcgggctgtttgactttctgtgagcccccagcgaggggaggcccagcctccgaggagaccaggaaccctgcttcagcagcccctcagggcttcccaaggatgtccagcccccacacccacacgttaacataatgagtcactaggcttctggggagggcccaacttcacccatgcatgagagactctcctcctttccagagagaatcggatcgcaccacgtgtggcagcctgcggcggggggaggggggcctctttagctctctttatctttctctctcactcatgtatgcatacatgcacagagatgcatacacaggtgcctatgcaagttcatttaagcctcagggctggtccctgcccaaagggctggaccctcctaatcctctcctaggttgtggggctggtcccctgacacccttctccccttcctggtagaccttaaacctcgcacacatgtccccagcattttctcacctggataaagcccataagctgggtctcaggctgggctcagcaaaggactcgccttgcaaccgacaggccattcccacccccacacacaacctcccctgttttcacattcaccatggcatcccagagcaaggacacaggagcccacaggccagttgaggttgggcaaggagacttccaggacttccagacagagtaccaggttttatttttcaccttattctctactttaaacaaatcataactttctctttaagcctctgctataaattctcctggctctcctgggcttccatattttgggggctggggtgtcaaaagtgagatgaagttcttagctccaggttttggggtaaaccaaggtaggaacattttggcatttatttcaattaacaatacttccttggacgggtgcggtggctcacgtctgtaatcccagcactttgggaggctgagacaggtggatcacttgaggtcgggagttcgagaccagcctggccaacatagcaaaaccctgtctctactaaaaatacaaaaattagatgggtgttttggcacctgcctgtaatctcagctactcaggaggctgaggcacaagaatcgcttgaatccaggaagcaagcggaggttgcagtgagttgagatcgcactccagcctgggtgacagagtgagattctgtctcaaaagcaaactaacaaagaaaaacaatacttcctggggttttggtgtgcagagggctttgttggaagtgtgactcaatcttgcctgccttctgggagctctagaattgttcccaacccagtccatggcttctagccaccactacagggctgtttcatgtacttctctctctgactctgtcttgtccgactctcttgagaatttctcaacgattgctcatgcctgtcagtatcagtgcttccatcgttccatctttgattcacttctctttcctttctatttactcccaaaatggagtcattcatcctgatgtcctcaattgctgctgatatgctggtgattcccaaatacatagctccaacccccaacttcccccagactttagatctgtattggtattacctactggacatctctatggacagttccgtatagactcaactcatctgcccaaccaagtatgttcctcctgaattcctctcctggttacttcatcacaatctacataggctcaccagctagaaacatttatgagcttacattccttcttcccatatcttatcagcatatcatatccatttcactccaacactctgtcttgaatttggccctccctctcccctctctactttaattcattggagcatgggatttggagttaggtggttttgggtttgaattccagctctactatttttggttgtgtgatagagttatttaacctctctgagcctcagttccctcgtatgtaaaatgatgataataatacctacctcacagggttgttgtgaggattta

SEQ ID NO: 103 - DNA, 2493 bp, Homo sapiens
cggggcccggagtggcttccctggctggcatctggacttaggctatttccgtgcacgtaaaagcggaatattggaacggttgcacagaacttccaaataatttttaccgccacgcaagatttagccctgaggtcttaatctcaggatttgggacagtaaaagctgtcgtccctccccctcgtccagccggtggcaagcgggtactgcgggcggttccgtccgtcccctttcgcagaaatggcaacgaatgaccaccagcattagctgagccaggggacgtgggagggttgattgcctaaacgactctgcatcgccgcctctttttgaaactaagagaaaatggtgggagatcaaaagaaaactaaataaacacacaggcaacttgtcctgggacctcaactaagcaaatgaagccttattgtgtgtgctgagcctgcagttcccaaccttccggggaagatgggaggacagggcgacaaagggcacagtaggcttgcctggcagtaagtgtgaccgcagctatccaggcggaagagcagaggactgaaaccaccctccagcaagcgagtgtccgccgcgttgagaaccgcgcaccctacccatcggccacgtgaccagtcctttttaaaaaaaatttctttaccttaaaaaaaaaaaaaaaaaaaaaaggtgggggagagactccacttcccagaagcctctcgttactcacgcagccgcagtcttgcgcaggtgccgccagggccaaacggacatatccgtcacgtggccagaagctggccaatccggtttgaatctcatttttttcctcttacccccccttctggagcggttgtgcgatcagatcgatctaagatggcgactgtcgaaccggaaaccacccctactcctaatcccccgactacagaagaggagaaaacggaatctaatcaggaggttgctaacccagaacactatattaaacatcccctacagaacagatgggcactctggttttttaaaaatgataaaagcaaaacttggcaagcaaacctgcggctgatctccaagtttgatactgttgaagacttttgggctctgtacaaccatatccagttgtctagtaatttaatgcctggctgtgactactcactttttaaggatggtattgagcctatgtgggaagatgagaaaaacaaacggggaggacgatggctaattacattgaacaaacagcagagacgaagtgacctcgatcgcttttggctagagacacttctgtgccttattggagaatcttttgatgactacagtgatgatgtatgtggcgctgttgttaatgttagagctaaaggtgataagatagcaatatggactactgaatgtgaaaacagagaagctgttacacatatagggagggtatacaaggaaaggttaggacttcctccaaagatagtgattggttatcagtcccacgcagacacagctactaagagcggctccaccactaaaaataggtttgttgtttaagaagacaccttctgagtattctcataggagactgcgtcaagcaatcgagatttgggagctgaaccaaagcctcttcaaaaagcagagtggactgcatttaaatttgatttccatcttaatgttactcagatataagagaagtctcattcgcctttgtcttgtacttctgtgttcatttttttttttttttttggctagagtttccactatcccaatcaaagaattacagtacacatccccagaatccataaatgtgttcctggcccactctgtaatagttcagtagaattaccattaattacatacagattttacctatccacaatagtcagaaaacaacttggcatttctatactttacaggaaaaaaaattctgttgttccattttatgcagaagcatattttgctggtttgaaagattatgatgcatacagttttctagcaattttctttgtttctttttacagcattgtctttgctgtactcttgctgatggctgctagattttaatttatttgtttccctacttgataatattagtgattctgatttcagtttttcatttgttttgcttttgtttttttcctcatgtaacattggtgaaggatccaggaatatgacacaaaggtggaataaacattaattttgtgcattctttggtaattttttttgttttttgtaactacaaagctttgctacaaatttatgcatttcattcaaatcagtgatctatgtttgtgtgatttcctaaacataattgtggattataaaaaatgtaacatcataattacattcctaactagaattagtatgtctgtttttgtatctttatgctgtattttaacactttgtattacttaggttattttgctttggttaaaaatggctcaagtagaaaagcagtcccattcatattaagacagtgtacaaaactgtaaataaaatgtgtacagtgaattgtcttttaaaaaaaaaaaaaaaaaa

SEQ ID NO: 104 - DNA, 877 bp, Homo sapiens
ggggcgaggcggagcgaggctggaggcgcgggagggcagcgagaggttcgcgggtgcagcgcacaggagaccatgtccgggggcagcagctgcagccagaccccaagccgggccatccccgccactcgccgggtggtgctcggcgacggcgtgcagctcccgcccggggactacagcacgacccccggcggcacgctcttcagcaccaccccgggaggtaccaggatcatctatgaccggaaattcctgatggagtgtcggaactcacctgtgaccaaaacacccccaagggatctgcccaccattccgggggtcaccagcccttccagtgatgagccccccatggaagccagccagagccacctgcgcaatagcccagaagataagcgggcgggcggtgaagagtcacagtttgagatggacatttaaagcaccagccatcgtgtggagcactaccaaggggcccctcagggccttcctgggaggagtcccaccagccaggccttatgaaagtgatcatactgggcaggcgttggcgtggggtcggacaccccagccctttctccctcactcagggcacctgccccctcctcttcgtgaacaccagcagatacctccttgtgcctccactgatgcaggagctgccaccccaaggggagtgacccctgccagcacaccctgcagccaagggccaggaagtggacaagaacgaacccttccttccgaatgatcagcagttccagcccctcgctgctgggggcgcaaccaccccttccttaggttgatgtgcttgggaaagctccctccccctccttccccaagagaggaaataaaagccaccttcgccctagggccaagaaaaaaaaaaaaaaaaaaa

SEQ ID NO: 105 - DNA, 4827 bp, Homo sapiens
gcggtggcgctgcggagacccggtccagacgcctggcggccgccggcacacaaggcgctttctagctccctcccccgagcgcacagcccgcctccttccgcggcgcctgcagtggcaggcttgctctgccctaccgtgacgcgctccggagacgctctgcgggtcctggacaccgggtccgcggcgtggggacgacagacggaggcgaacgccatcggtagccggtccgcgagccatcgttcggggcgcagtcctctccccggctggccctcctttctccggggcattcgccaccgcttccctgggctgagacgaccggttcgtcgcctccttgcccgtgaccgtcgctagaactcagttgtgcgttgcggccagtcgccactgctgagtggaagcaaaatgtcagtcagtgtgcatgagaaccgcaagtccagggccagcagcggctccattaacatctatctgtttcacaagtcctcctacgctgacagcgtcctcactcacctgaatcttttacgccagcagcgtctcttcactgacgtccttctccatgccggaaataggaccttcccttgccaccgggcagtgctggctgcatgcagtcgctactttgaggccatgttcagtggtggcctgaaagagagccaggacagtgaggtcaactttgacaattccatccacccagaagtcttggagctgctgcttgactatgcgtactcctcccgggtcatcatcaatgaagaaaatgcagaatcgctcctggaagctggtgacatgctggagtttcaagacatccgggatgcatgtgcagagttcctggaaaagaacctgcatcccaccaactgcctgggcatgctgctgctgtctgatgcacaccagtgcaccaagctgtacgaactatcttggagaatgtgtctcagcaacttccaaaccatcaggaagaatgaagatttcctccagctgccccaggacatggtagtgcaactcttgtccagtgaagagctggagacagaggatgaaaggcttgtgtacgagtctgcaattaactggatcagctatgacctgaagaagcgctattgctacctcccagaactgttgcagacagtaaggctggcacttctgccagccatctatctcatggagaatgtggccatggaggaactcatcaccaagcagagaaagagtaaggaaattgtggaagaggccatcaggtgcaaactgaaaatcctgcagaatgacggtgtggtaaccagcctctgtgcccgacctcggaaaactggccatgccctcttccttctgggaggacagactttcatgtgtgacaagttgtatctggtagaccagaaggccaaagaaatcattcccaaggctgacattcccagcccaagaaaagagtttagtgcatgtgcgattggctgcaaagtgtacattactggggggcgggggtctgaaaatggggtctcgaaagatgtctgggtttatgataccctgcacgaggagtggtccaaggctgcccccatgctggtggccaggtttggccatggctctgctgaactgaagcactgcctgtatgtggttggggggcacacggccgcaactggctgcctcccggcctccccctcagtctctctaaagcaggtagaacattatgaccccacaatcaacaaatggaccatggtggccccactccgagaaggcgttagcaacgccgcagtagtgagtgccaaacttaagttatttgctttcggaggtaccagtgtcagtcatgacaagctccccaaagttcagtgttacgatcagtgtgaaaacaggtggactgtaccggccacctgtccccagccctggcgttacacagcagcagctgtgctggggaaccagatttttattatggggggtgatacagaattctctgcctgctctgcttataaattcaacagtgagacttaccagtggaccaaagtgggagatgtgacagcaaagcgcatgagctgccatgctgtggcctctggaaacaaactctacgtggttggaggatactttggcattcagcgatgcaagactttggactgctacgatccaacattagacgtgtggaacagcatcaccactgtcccgtactcgctgattcctactgcatttgtcagcacctggaaacatctgccttcttaaatgcagtacattctaaagagagtgagcatgagctcactccatcactcgatgagataatatgagatttctacttcggagaggccaagtctaatgaagagaaaaaaaggaaaagaagttgcaagactcgaataaaatctgctgcaccttgtaaatgctctaactggacatgaaggaaaggggcgagggaggggggtgggatttttggtgcaagtagcacatggtttaaatatgaatgaacaaacctgtgatctagtccttgtcttgtaattgtggattaatgtcaatgttaatcagcccctcaaagggagagaaaagctggaccttttcccttgctgtaccatattcagcatttgatttccatgggccccaccatttatgtgtagaatttgaaatggttgtcacctctctctgaggacagagcttgaagcctccacaccagctgctgctggagattcaaagcccaactgtgggtccgagagggaagctggctgggctggctgaagaatgaagaccactggactctccgttaatctctaaggggtctgctccccaggaacgtttctgaacaatggggactttgttggtagccatttggtagatgttcttttctatttataagtgactttaaactttcccttggctgttaagaagtttgttatagatttagctatttattgttcgatgcctgcatgctgaaacaatgcctacagctgtcttcacatgtatggacgtgtgtgaatggttgtacgttttgcacattttgtggctgttgagatgtgctttgctgcacaaacatgaaaatttttgagttacaatttggagcataactggagggtgggctggggaggggtggatttttaaaatgtcaagacagggaaggatgacaaaatggaaatttaaatgacatcctagaggtagagaaaccgtggagatcgcttttctcagactcaccaacttttaatgggatttcatggggtttggttgtgctgatagggtaaggggaggctgctttctgcccttctccccactcccatctgatttacttaattcagtctcagctgctgaaatttggaaaggaccaaattgctttacagtttttttctttgtgtagtatcttgaaatcctggaaaattctatggaatagttctgtatatagggcacaagtaaaggcattgtccaaagtttatttatttatttattaccctaagaatgctttgccataaccacatttaatgggaaaaacggcatgtatcacagatgtaaattaactcaccagatttactgggcctgaactcattctcttcttgctatatgatttagcaagttctagaaggtctccaagacaataattacattggcacaatgtatacttcagtgctcacccgtagcaaatctctttttaaaaaactctttggtgcacaagtaacacatttggccacaaaacaccaaagaattgtaggcagtggcccctattgagaagttttccggtagagttggaaatcagttgtgaatacattctttgctagttggagtgcttgtttactaagcatgtgccgtcgtaggtattagtgctagtctcaaataggtgcttcccctgaggtgcaggggaagaccaaagtttgcaactcgaactgctttcgtccatgtttctcacattgctgtattttagaaaataggggttaagactgataacaaccttttacattgtgactgtgtttgcattgtctaatgacagataaatccttaacatttctctccaccttagtactttagactaattgtgtttgtccgtccatgccatgaatgagtgggctgtagttgggcctaaataaatgagctgttggaagaaaagaatcacagtactttccagcagtcagtccctggttcctagatgtgttctaagcaatgcaaatgtctaattgtcccccagtgggcatagtcagtgtcgtttatattgtagcagttacagctctgtagtttatgatgcaaatctgccaagagagatgtatgtgtcactgcatggcttctgaaagcaggatgaattttctgcagctgtttcaaagttggggtctgttcttgaatcctctattaattactgtgtgtgagccagagggagctgtggtaagggttgggcccccagcctgtagggaactttctggactcccactctttgaatcgatataggcatttggtctcactacttgaccattctcaccctgtgaaacgtcccacactttgaagcaaatacaattcacagcacagtacacacaaaaaccttggcataagacagagaaggttcttcttattttgtgggctggttgctgtagaaacatataacaaagggcagccctccacttctggtataattgtgtagccccttttctttgggcttgacacctgtcttgaataagagtgattagagctgcataatgtccctctcttggctattgaccatgtggttcacgtacaaaactctgtataagttgaaggaaaatgttcatgttcatatgtacttgtttgctatgactacattttgaggttttgtaaaactgttatttttttttttttcacaatgtgaaactgaaggtcaataaattattagagattttctcttcaaaaaaaaaaaaaaaaaaaaaaaaaaaaaaaaaaaaaaaaaaa

SEQ ID NO: 106 - DNA, 8765 bp, Homo sapiens
ggacagcgccgaggaggaagaggttgatggcggcggcggagctccgagagacctcggctgggcaggggccggccgtggcgggccggggactgcgcctctagagccgcgagttctcgggaattcgccgcagcggacgcgctcggcgaatttgtgctcttgtgccctcctccgggcttgggcccaggcccggcccctcgcacttgcccttaccttttctatcgagtccgcatccctctccagccactgcgacccggcgaagagaaaaaggaacttcccccaccccctcgggtgccgtcggagccccccagcccacccctgggtgcggcgcggggaccccgggccgaagaagagatttcctgaggattctggttttcctcgcttgtatctccgaaagaattaaaaatggccgagaatgtggtggaaccggggccgccttcagccaagcggcctaaactctcatctccggccctctcggcgtccgccagcgatggcacagattttggctctctatttgacttggagcacgacttaccagatgaattaatcaactctacagaattgggactaaccaatggtggtgatattaatcagcttcagacaagtcttggcatggtacaagatgcagcttctaaacataaacagctgtcagaattgctgcgatctggtagttcccctaacctcaatatgggagttggtggcccaggtcaagtcatggccagccaggcccaacagagcagtcctggattaggtttgataaatagcatggtcaaaagcccaatgacacaggcaggcttgacttctcccaacatggggatgggcactagtggaccaaatcagggtcctacgcagtcaacaggtatgatgaacagtccagtaaatcagcctgccatgggaatgaacacagggatgaatgcgggcatgaatcctggaatgttggctgcaggcaatggacaagggataatgcctaatcaagtcatgaacggttcaattggagcaggccgagggcgacagaatatgcagtacccaaacccaggcatgggaagtgctggcaacttactgactgagcctcttcagcagggctctccccagatgggaggacaaacaggattgagaggcccccagcctcttaagatgggaatgatgaacaaccccaatccttatggttcaccatatactcagaatcctggacagcagattggagccagtggccttggtctccagattcagacaaaaactgtactatcaaataacttatctccatttgctatggacaaaaaggcagttcctggtggaggaatgcccaacatgggtcaacagccagccccgcaggtccagcagccaggcctggtgactccagttgcccaagggatgggttctggagcacatacagctgatccagagaagcgcaagctcatccagcagcagcttgttctccttttgcatgctcacaagtgccagcgccgggaacaggccaatggggaagtgaggcagtgcaaccttccccactgtcgcacaatgaagaatgtcctaaaccacatgacacactgccagtcaggcaagtcttgccaagtggcacactgtgcatcttctcgacaaatcatttcacactggaagaattgtacaagacatgattgtcctgtgtgtctccccctcaaaaatgctggtgataagagaaatcaacagccaattttgactggagcacccgttggacttggaaatcctagctctctaggggtgggtcaacagtctgcccccaacctaagcactgttagtcagattgatcccagctccatagaaagagcctatgcagctcttggactaccctatcaagtaaatcagatgccgacacaaccccaggtgcaagcaaagaaccagcagaatcagcagcctgggcagtctccccaaggcatgcggcccatgagcaacatgagtgctagtcctatgggagtaaatggaggtgtaggagttcaaacgccgagtcttctttctgactcaatgttgcattcagccataaattctcaaaacccaatgatgagtgaaaatgccagtgtgccctccctgggtcctatgccaacagcagctcaaccatccactactggaattcggaaacagtggcacgaagatattactcaggatcttcgaaatcatcttgttcacaaactcgtccaagccatatttcctacgccggatcctgctgctttaaaagacagacggatggaaaacctagttgcatatgctcggaaagttgaaggggacatgtatgaatctgcaaacaatcgagcggaatactaccaccttctagctgagaaaatctataagatccagaaagaactagaagaaaaacgaaggaccagactacagaagcagaacatgctaccaaatgctgcaggcatggttccagtttccatgaatccagggcctaacatgggacagccgcaaccaggaatgacttctaatggccctctacctgacccaagtatgatccgtggcagtgtgccaaaccagatgatgcctcgaataactccacaatctggtttgaatcaatttggccagatgagcatggcccagccccctattgtaccccggcaaacccctcctcttcagcaccatggacagttggctcaacctggagctctcaacccgcctatgggctatgggcctcgtatgcaacagccttccaaccagggccagttccttcctcagactcagttcccatcacagggaatgaatgtaacaaatatccctttggctccgtccagcggtcaagctccagtgtctcaagcacaaatgtctagttcttcctgcccggtgaactctcctataatgcctccagggtctcaggggagccacattcactgtccccagcttcctcaaccagctcttcatcagaattcaccctcgcctgtacctagtcgtacccccacccctcaccatactcccccaagcataggggctcagcagccaccagcaacaacaattccagcccctgttcctacacctcctgccatgccacctgggccacagtcccaggctctacatccccctccaaggcagacacctacaccaccaacaacacaacttccccaacaagtgcagccttcacttcctgctgcaccttctgctgaccagccccagcagcagcctcgctcacagcagagcacagcagcgtctgttcctaccccaacagcaccgctgcttcctccgcagcctgcaactccactttcccagccagctgtaagcattgaaggacaggtatcaaatcctccatctactagtagcacagaagtgaattctcaggccattgctgagaagcagccttcccaggaagtgaagatggaggccaaaatggaagtggatcaaccagaaccagcagatactcagccggaggatatttcagagtctaaagtggaagactgtaaaatggaatctaccgaaacagaagagagaagcactgagttaaaaactgaaataaaagaggaggaagaccagccaagtacttcagctacccagtcatctccggctccaggacagtcaaagaaaaagattttcaaaccagaagaactacgacaggcactgatgccaactttggaggcactttaccgtcaggatccagaatcccttccctttcgtcaacctgtggaccctcagcttttaggaatccctgattactttgatattgtgaagagccccatggatctttctaccattaagaggaagttagacactggacagtatcaggagccctggcagtatgtcgatgatatttggcttatgttcaataatgcctggttatataaccggaaaacatcacgggtatacaaatactgctccaagctctctgaggtctttgaacaagaaattgacccagtgatgcaaagccttggatactgttgtggcagaaagttggagttctctccacagacactgtgttgctacggcaaacagttgtgcacaatacctcgtgatgccacttattacagttaccagaacaggtatcatttctgtgagaagtgtttcaatgagatccaaggggagagcgtttctttgggggatgacccttcccagcctcaaactacaataaataaagaacaattttccaagagaaaaaatgacacactggatcctgaactgtttgttgaatgtacagagtgcggaagaaagatgcatcagatctgtgtccttcaccatgagatcatctggcctgctggattcgtctgtgatggctgtttaaagaaaagtgcacgaactaggaaagaaaataagttttctgctaaaaggttgccatctaccagacttggcacctttctagagaatcgtgtgaatgactttctgaggcgacagaatcaccctgagtcaggagaggtcactgttagagtagttcatgcttctgacaaaaccgtggaagtaaaaccaggcatgaaagcaaggtttgtggacagtggagagatggcagaatcctttccataccgaaccaaagccctctttgcctttgaagaaattgatggtgttgacctgtgcttctttggcatgcatgttcaagagtatggctctgactgccctccacccaaccagaggagagtatacatatcttacctcgatagtgttcatttcttccgtcctaaatgcttgaggactgcagtctatcatgaaatcctaattggatatttagaatatgtcaagaaattaggttacacaacagggcatatttgggcatgtccaccaagtgagggagatgattatatcttccattgccatcctcctgaccagaagatacccaagcccaagcgactgcaggaatggtacaaaaaaatgcttgacaaggctgtatcagagcgtattgtccatgactacaaggatatttttaaacaagctactgaagatagattaacaagtgcaaaggaattgccttatttcgagggtgatttctggcccaatgttctggaagaaagcattaaggaactggaacaggaggaagaagagagaaaacgagaggaaaacaccagcaatgaaagcacagatgtgaccaagggagacagcaaaaatgctaaaaagaagaataataagaaaaccagcaaaaataagagcagcctgagtaggggcaacaagaagaaacccgggatgcccaatgtatctaacgacctctcacagaaactatatgccaccatggagaagcataaagaggtcttctttgtgatccgcctcattgctggccctgctgccaactccctgcctcccattgttgatcctgatcctctcatcccctgcgatctgatggatggtcgggatgcgtttctcacgctggcaagggacaagcacctggagttctcttcactccgaagagcccagtggtccaccatgtgcatgctggtggagctgcacacgcagagccaggaccgctttgtctacacctgcaatgaatgcaagcaccatgtggagacacgctggcactgtactgtctgtgaggattatgacttgtgtatcacctgctataacactaaaaaccatgaccacaaaatggagaaactaggccttggcttagatgatgagagcaacaaccagcaggctgcagccacccagagcccaggcgattctcgccgcctgagtatccagcgctgcatccagtctctggtccatgcttgccagtgtcggaatgccaattgctcactgccatcctgccagaagatgaagcgggttgtgcagcataccaagggttgcaaacggaaaaccaatggcgggtgccccatctgcaagcagctcattgccctctgctgctaccatgccaagcactgccaggagaacaaatgcccggtgccgttctgcctaaacatcaagcagaagctccggcagcaacagctgcagcaccgactacagcaggcccaaatgcttcgcaggaggatggccagcatgcagcggactggtgtggttgggcagcaacagggcctcccttcccccactcctgccactccaacgacaccaactggccaacagccaaccaccccgcagacgccccagcccacttctcagcctcagcctacccctcccaatagcatgccaccctacttgcccaggactcaagctgctggccctgtgtcccagggtaaggcagcaggccaggtgacccctccaacccctcctcagactgctcagccaccccttccagggcccccacctgcagcagtggaaatggcaatgcagattcagagagcagcggagacgcagcgccagatggcccacgtgcaaatttttcaaaggccaatccaacaccagatgcccccgatgactcccatggcccccatgggtatgaacccacctcccatgaccagaggtcccagtgggcatttggagccagggatgggaccgacagggatgcagcaacagccaccctggagccaaggaggattgcctcagccccagcaactacagtctgggatgccaaggccagccatgatgtcagtggcccagcatggtcaacctttgaacatggctccacaaccaggattgggccaggtaggtatcagcccactcaaaccaggcactgtgtctcaacaagccttacaaaaccttttgcggactctcaggtctcccagctctcccctgcagcagcaacaggtgcttagtatccttcacgccaacccccagctgttggctgcattcatcaagcagcgggctgccaagtatgccaactctaatccacaacccatccctgggcagcctggcatgccccaggggcagccagggctacagccacctaccatgccaggtcagcagggggtccactccaatccagccatgcagaacatgaatccaatgcaggcgggcgttcagagggctggcctgccccagcagcaaccacagcagcaactccagccacccatgggagggatgagcccccaggctcagcagatgaacatgaaccacaacaccatgccttcacaattccgagacatcttgagacgacagcaaatgatgcaacagcagcagcaacagggagcagggccaggaataggccctggaatggccaaccataaccagttccagcaaccccaaggagttggctacccaccacagcagcagcagcggatgcagcatcacatgcaacagatgcaacaaggaaatatgggacagataggccagcttccccaggccttgggagcagaggcaggtgccagtctacaggcctatcagcagcgactccttcagcaacagatggggtcccctgttcagcccaaccccatgagcccccagcagcatatgctcccaaatcaggcccagtccccacacctacaaggccagcagatccctaattctctctccaatcaagtgcgctctccccagcctgtcccttctccacggccacagtcccagcccccccactccagtccttccccaaggatgcagcctcagccttctccacaccacgtttccccacagacaagttccccacatcctggactggtagctgcccaggccaaccccatggaacaagggcattttgccagcccggaccagaattcaatgctttctcagcttgctagcaatccaggcatggcaaacctccatggtgcaagcgccacggacctgggactcagcaccgataactcagacttgaattcaaacctctcacagagtacactagacatacactagagacaccttgtagtattttgggagcaaaaaaattattttctcttaacaagactttttgtactgaaaacaatttttttgaatctttcgtagcctaaaagacaattttccttggaacacataagaactgtgcagtagccgtttgtggtttaaagcaaacatgcaagatgaacctgagggatgatagaatacaaagaatatatttttgttatggctggttaccaccagcctttcttcccctttgtgtgtgtggttcaagtgtgcactgggaggaggctgaggcctgtgaagccaaacaatatgctcctgccttgcacctccaataggttttattattttttttaaattaatgaacatatgtaatattaatagttattatttactggtgcagatggttgacatttttccctattttcctcactttatggaagagttaaaacatttctaaaccagaggacaaaaggggttaatgttactttaaaattacattctatatatatataaatatatataaatatatattaaaataccagttttttttctctgggtgcaaagatgttcattcttttaaaaaatgtttaaaaaaaaaaaaaaactgcctttcttcccctcaagtcaacttttgtgctccagaaaattttctattctgtaagtctgagcgtaaaacttcaagtattaaaataatttgtacatgtagagagaaaaatgactttttcaaaaatatacaggggcagctgccaaattgatgtattatatattgtggtttctgtttcttgaaagaatttttttcgttatttttacatctaacaaagtaaaaaaattaaaaagagggtaagaaacgattccggtgggatgattttaacatgcaaaatgtccctgggggtttcttctttgcttgctttcttcctccttaccctaccccccactcacacacacacacacacacacacacacacacacacacacacactttctataaaacttgaaaatagcaaaaaccctcaactgttgtaaatcatgcaattaaagttgattacttataaatatgaactttggatcactgtatagactgttaaatttgatttcttattacctattgttaaataaactgtgtgagacag

SEQ ID NO: 107 - DNA, 4575 bp, Homo sapiens
gtagtcgtggcgctctcgaggccctgccatgagcaagctcttaactcttcaggtctgcacgtcctacgcccaccgtccagtgctactctcagctcggagttcagcttcgggctgccaagagccagcaacctggtgtcagaggctcggtcccacaacgctctgcgggccgcggcgcctgctgggaggtgtagtccccgatctgcgtactgcgttcgccgagggggagggcggagctgccggcggcccgggcgggctggcagctagagtgggtgcgatagccgcctccgcctctgccgcctccgccgtcgcctcctccgcccgggccgttcgctgctgcgcggggagagcgaggcggggccgccggggccgccatggagcccgactcggtgattgaggacaagaccatcgagctcatgtgttctgtgccaaggtctttgtggctaggctgcgccaacctggtagagagcatgtgcgcactgagttgcctgcagagcatgcccagtgtcagatgtctccagataagtaatggaacatcatctgtgatcgtctccagaaagaggccatcagaaggaaactatcaaaaagaaaaagacttgtgtattaaatattttgaccagtggtctgaatcagatcaagtggaatttgtggaacatcttatttcacgaatgtgtcattatcagcatggacatattaactcttacctgaagcccatgttgcagcgggactttattaccgctttaccagagcaaggcttagatcacatagcagaaaacattctttcgtacctggatgccaggtctctgtgtgcagcagagctggtatgtaaagaatggcagcgagtgatctcagaaggaatgctttggaagaagctgattgaacgaatggtacgcactgatcccctatggaaaggactttcagaaagaagagggtgggatcagtacctgtttaaaaacagacccacagatggccctccaaattcattttataggtcattatacccaaagattatccaggatatagagactatagaatctaactggcggtgtggacgacacaacttgcagaggattcagtgccgctctgaaaatagtaaaggtgtctactgtttacagtacgatgatgaaaaaattatcagtggcctacgagataattctattaagatatgggataaaaccagcctggaatgtttgaaagtgttaacaggacacacaggctctgtcctctgtctgcagtatgatgagcgtgtcattgtaactggctcttcagattctacggtgagagtgtgggatgtgaacacgggtgaagttcttaacacattgatccaccacaatgaggctgtattgcacttacgcttcagcaatggactgatggtgacctgttccaaggaccgctccattgctgtgtgggacatggcttctgcgaccgacatcactttacgccgtgtcctggttggccaccgggctgccgtcaatgtagtagactttgacgacaagtacatcgtgtctgcctctggtgacaggaccatcaaagtctggagcacgagcacctgtgaatttgttcgtactctcaatgggcacaagcggggcattgcctgtctccagtacagggatcgcctggttgttagtggatcatcagataataccattaggctctgggatattgaatgtggtgcctgtttaagagtcctagagggacatgaagaattggtccgatgcatccggtttgataacaagaggattgtcagtggggcctatgatgggaaaattaaagtttgggacttgcaagctgctcttgaccctcgagccccagcaagcacattgtgtttgcgcacattggtggaacattctggacgtgtgtttcggctccagtttgatgagtttcagatcatcagcagctcccatgatgacactattttgatttgggatttcttaaatgtgcctcccagtgcccagaatgagacccgttctccctccagaacatacacttacatctctagataacagtctgcactttcacccgtttcagggttttctagtcttgaactactggctacgtggctaccaaatgcctaagggagttcgttcacagctgagttatgaagctggaattggttctagacgctgggtagatgcaaagcagcctaactcttcaagtaccgacatttctcacctctgattccggctctcctttgagaaggagaccttagcttccccggcttcaagtagaacagaagcccgtttccttccctcatcagtgaaaaaatctaatgtttcaaatgtaaattgttcatagaaaaggaacatagaatctgttttacagaagtaaatcgaccgtcaagagaagacttggcctctaatttatattgctttgcactttggtttgatattaagaaacagcattcttcttcagtgaaattttgggtgccaaacacctacccagaatgtccagggctttcattttcaaaagttagcattctccttttgaccgtccaagtcattatgaattctgacttgttgtattaggaacatgttggacagtggaaaattttctctggattgttttagtaatatttttgggattatacttcctttctgtaccaatttcttttaatttaaagaactataagtcagttatattatctaccaacaggtaatatagctctttcttttattaactgttctctgtcccccaaccatctcctgatatttggtagagtaacacctttatacgtgtgcttgcctcctaatttaaaatactgtattcgcatgtagatataatgtacataacagtttaacctcaaagttgctggagtcagggccccctgtgcttgagacactaatacagagtgtgttcgcacttagccatgggctgggctcaagaacctgatacctgggttgatgtggattacctagaacccttcctgcagtattcatacagtgtttttattttgttgttgtcattgcgtgtgtgtggtttgtgtgtgtttttaatgagaatcttgttttaaaatgtaatttctaaggtttaacaccaaaatgttttatttgttgtggagtatatattatacaatagagaggtaccttaaacattttttgttcttattctttttctcataagtactcctgagtacaagtggtcacctcccatagtattcatttggcttcgctgtcaaaaatcattattctgtgcagtcgtggccctgggaaggggaaataagaaggccctgttgacgggctgtcttggctctggaattcatgcatcctggccttgccaaggttctggcagggcctgctggtgtgttggagcctgcagggcaggtcaggctggttcagaggcccatgctgaggggtgggtgctctgaagtggagtgaagcctcaagcccatgaatgccaccccagtcatctctggtgtcagctgctgctgtggccccagcaggttctcaaagctcccaagtcctccctacgacacagcccaaatgtgtaaatggcactgttgccctgacagtgcatggaaaggacgttggcatccaattggcactccttctcccttattcaatattaggtttgatttgcccttcgccattgtttccaaagatcaaggaatgtcaataacattttaaaggaccaataaacagcctcctataaagtaaacctcttcccgtggaagcacactctactactaaagggaaggccctgggctctgatttgtcctttgcattgagaacggtgtggggatcagtgtgtgtgtatgtgatttgtttattgagttggctttgcttttttagtttttcttttaaaaataaaatccttccttcccatgttactaaattaatttatgtttttgagaggttgagtctcaaagtgtaaacaataaacctccattcataaggtggatgttgtaagcttgatggtggttgtgaaagtgatttagctttgaccacttttcatcctacagcttcaatatcaaactggttaggaaagcccagggggaagggagggggcaggggaggaggcaattctgaatgaatgaatggattttttgttgtttttgcatgtttaatatagaagttcccctcgttccttgggagatgatggcctttgaatatgcagacaacctttgaattgtgcctactaaattatagcaggggactttggcacccaaggagttctgactttctgggattataatagtaattcccagccatactctggactttattttgctaaccataactgagcaaatgtaaattactgctatattaatgttttaaagcactgggatagtctaattctaacttgtaattaattatgtttgccaattatctgtttgaaataaatttgtgtctgaacagctattgaaactgttaaattgtacagatattattcatgacagctttgtactgtggaatgtgcttaataaaaaacaaaaaagtttgacttttgtccagtaaattgctaagtaatgtcaataaatcgagtatgggtattatgcagtgcacctaatctggcttcatgcaattgttacttcagctactgattcaaagccaatactcttaataaagtgttgcaatactc

SEQ ID NO: 108 - DNA, 9186 bp, Homo sapiens
gcttccgccgggagccgcggagctgagggacgcgcggagatgacgcaggcagcaccggaagccgctcccctgtgaggctgcggaccgggagcagcggccgcaggtccgggcgccatggctgcggagcggacccggccgctgcaaggctctggcggtccgagcgtgcctagtagctgtgaacccggcgcgaggtcccgggccccggggcgctcgctcaggtaaatttttccataaccttatggagagaaaggactttgagacatggcttgataacatttctgttacatttctttctctgacggacttgcagaaaaatgaaactctggatcacctgattagtctgagtggggcagtccagctcaggcatctctccaataacctagagactctcctcaagcgggacttcctcaaactccttcccctggagctcagtttttatttgttaaaatggctcgatcctcagactttactcacatgctgcctcgtctctaaacagtggaataaggtgataagtgcctgtacagaggtgtggcagactgcatgtaaaaatttgggctggcagatagatgattctgttcaggacgctttgcactggaagaaggtttatttgaaggctattttgagaatgaagcaactggaggaccatgaagcctttgaaacctcgtcattaattggacacagtgccagagtgtatgcactttactacaaagatggacttctctgtacagggtcagatgacttgtctgcaaagctgtgggatgtgagcacagggcagtgcgtttatggcatccagacccacacttgtgcagcggtgaagtttgatgaacagaagcttgtgacaggctcctttgacaacactgtggcttgctgggaatggagttccggagccaggacccagcactttcgggggcacacgggggcggtatttagcgtggactacaatgatgaactggatatcttggtgagcggctctgcagacttcactgtgaaagtatgggctttatctgctgggacatgcctgaacacactcaccgggcacacggaatgggtcaccaaggtagttttgcagaagtgcaaagtcaagtctctcttgcacagtcctggagactacatcctcttaagtgcagacaaatatgagattaagatttggccaattgggagagaaatcaactgtaagtgcttaaagacattgtctgtctctgaggatagaagtatctgcctgcagccaagacttcattttgatggcaaatacattgtctgtagttcagcacttggtctctaccagtgggactttgccagttatgatattctcagggtcatcaagactcctgagatagcaaacttggccttgcttggctttggagatatctttgccctgctgtttgacaaccgctacctgtacatcatggacttgcggacagagagcctgattagtcgctggcctctgccagagtacaggaaatcaaagagaggctcaagcttcctggcaggcgaagcatcctggctgaatggactggatgggcacaatgacacgggcttggtctttgccaccagcatgcctgaccacagtattcacctggtgttgtggaaggagcacggctgacaccatgagccaccaccgctgactgactttgggtgccggggctgcgggttttgggtgcaacctctgcggcagccgactgcatgaaccaaagttctcacctaatggtatcatcacgcagtgcacaatcatttatctatgttttgccaggggccagggctcggggtgggggagggcttgttttattgacatacaacgcagcatgctaatggggtacaccattgacttcatttgtacttagttatgttggtcagtgttagaggatgcattttgggttcatctttcttgagtggagtattggttttaagtaaagaaagttaaatgatccattaatctgctaattggttgcctatgaaatcacattgtctgttattaaagctttttaccatagcctttttttcttttgaagttgaagcaaaggtgctatgatgttgttacagcaactttcctcacacggggtttagctcttataagagccagtgttaaaacttccaccaaataccagtttataaacttccaccaaataccagtgctaaggaaagtctgtcttccagttcaaatccaattctgtaaattgaatgttagcaactcattctaaaccttatatcttggcagagtcaaggttggccatgtttaagatgtgagcgagttctgtagtttttgttgccatgtcggggaagctagtccccggcagcctggatgactgcacagcggtgccctggtatagcagaaaagagcagtgagctggaaggttagagaccgggcctcttaccctggaactctgcaccctctctgggtcccagcttccttgtctgtacagccaggtatgaagctcagtgatttctaagattctttctggtccttcacctactgaaatgtgtaaaagttgatcatgtatttttgtctgatccctgattcatggtttctttcaggtcggataatatttaaatgaaatgactgttacagagttttctataagaacatcaattatatgaaaaggatgaataaaagggaaatgtagaaaatatagctgattccacttagacagtttaagtaattggttgaagaaatgctgatagaagccatggtttaaatagggacacagtatgctatactagaaggatacctgaacccaacctaacttcctcctttgcctctaacttaatctgcagcctcaggcaagttaactttctcttctaagaccatcattttcttcatcttttaagtgagggaattgtcctagatgagggctcacaaacccaaatgcctaagggagccgtgcaggtaacataaatgagtaaaacattctggggaggattgtgctgtcccctggaaagttgatctaatagggcagttattcagctctgttttgtcattaggagaagcaagcccagggttggcaggtcttcacattgtttcaggaggagctagaaatccagatttttatttgaaatcctggatttttaaaacgttacaactgattaaagaaaatttgaaataaggtgagccaaacaaaacatgtccctgggttgccagattgtgtcctcctccctctctaaagttaggtaattttgtgattcagcagtggaaatgttagtggtcacaatcagggagagagtagagggagcaagcagtagaaaaatctcagccgctcttcagctgtctccccttgtattacaagggtggtggggagggatgtatttcattcacagaccaataggaaggtagtttgaagatgaacataagaattggaacctcagtgacagcttatgtctgggaacatgagttattccttcttgctgactccagtataaagcatatccattttacaggtgagaaaaagggttgctggcagagctgagaatgatgtgaactctagagtggggacctatctcttgcagaatctgcattagcatagagccagactctggacctctgagtgctgtgaagttgatagaaattaatggtgaatttcaaggacagatatcattaatatccatgttgaaactctgtggggtttaagcaaaagaacaatatcttcccccatcccacaaaatctgggtttaatctatctcacattgagttctgtgcatcagctctgcttagtactctagaaatagaaccggaatcacaactgaatctattttgcagaagccccaggagactttgggcaatgatgatggtaaatgactttttactttattattatttttttttttttgagacagagtttcgctcttactgcgcaggctggagtgcaatggcacgatcttggctcactgcaacctccgcctcctgggttcaagtgattctcctgcctcagcctcctaagtagctgggattacaagcatctgccatgacacccaactaatttttatatttttagtagagacagggttccaccatgttggccaggctggtcttgaactcctgacctcaggtcatccacctgccttggcctcccaaagtgctgggattacaggcgtgagccaccacgcctggccgagtttttactttttatcgagcctgaacagataactattactgatctaatgaccatccccaccctacctcactttcagatctatccaatagcttcaaagggcaagtaattataatcatttgtgggaaaagttttattaaaaagtgacaaacttgaagctgtatatagtatgttctatttcagtttttagtggtgaatacagaagtcatcaaggtggtacttggtgccgctggaattttttttttttcctaggcagtcttgctctgtcatacaggctggagtacagtggcatcatcatgcagctggattttgacagcagaacttcaggcagtaattggagtcctaatgtcagttcttccttatggaggcctttatttggcctgagattttattcaactactttatagatgctgggtttattcatactatcgccagtttttataaaaatggaaaactagctcatcctttttgcaaaagaaagcaaagtggggagtcagaatgagaagtggataggggataactaaaactattctttactctcctttcattgcctttgagagctagctcttgcacacactgactttggcttccttagcgcataggtaagggaattgcctttccctcttttgtgaatattctcatttctgaaaaattctaagtcatgagaagataagccctatcctttcttacaaggattggatttcttgggtgacactgtggtgtggtggaagccagcggcttctttcaggttcataaaggccatcataacaacttcaggcttcatggtgtggacagggatccaggagagctgagtggatgtgtgaagtttctgatagattctgtcatcattccaaaggaatgtagtttcctccagctcaatcatttgaagtaatacacattgccaaatctgactgtaacctgacattttagacctattggagaaataggaagaaagcccctccagtggaaggactggacttggaagaagttctgcaggaaggtgcatgcaattggatagctgttcatgagtgaaacgtggggaacattgctatgaaattgtaaggtttgcacttcatttttcgtagtttaaaaattgctctgttctggctgttgaaaacacttggtgtgaggtttgaatgaggattatataatcattctagtattcataggaaaatgattactgctctctatttgtaaaacaaaagaaataactttcggaaacagtattttagacatgaggaaattgtttgtattaggcattttgatctaacagaatcagctaaggatagtggatcctggctttacacatttctttgaccaaacccagctggcaacttgaagttgttactgtgtggcttccagattgcctagaggtgaatcctaccaacatcactgttttttttgttttgttttgttttttttgtatgtttttgagacagagtcttgctctatccccaggctggagtgcagtggcgtgatctcggcttactgcaacctcagcctcctgggttcaagcgattctcctgcctcagcctcctgagtagctgagactacaggcgcgtgccaccacgcccagctatttttgtatttttagtagagacgaggtttcactatgttggccaggatggtcttgatttcttgacctcgtgttctgcccgcctctacctcccaaagtgccgggattacaggcgtgagctgctgtgcccggccccagcatcacttttatagctttctgtgcctcttcctctgggccttggtgtatgaagccacttgcctttctctgttgggaagcgagcagaatcagattgctactcatgatgcagtccgggcagggcatactgtcacctttgcctgtggacacagttgtcaggataggggagaagccctttaggtccgtcttcttgacacagccctcctacctggttacgctggtgctttcgcttggtttagacaaccaagacacttgagaattatgctgtcctcagaatgtctgatgaaaagaacagattcacttttttgacacaatgcccattagccatctttggcagtgtttctgatcaaaggttccccatgcctgctctaggaaagtaaacttttttcagaataaatcctcaaatggattactgagtagtctttgcaccattcccatcagcctaatcagactgaatggtcacgctcagtgcaaaaagctgttttgctgttaggatgtttcagtgtttcttgtctttcctggaacagttcagttgtttaaatttagtaattcaatcctgaccagtgtaaacccacttaattattgcagcctaaagaattcagctacttctactcttcataaatgtgcccaagtaaatatgtgtttttaatattcaaccctggaaaattagtaattcagatgataaaagctcatgttttggtgtctttgtactcagattgtgaacaggcatatttcactgatttagacttagtatacttgatgagaatgctcaggttgaagagatagttctgtcagcaatccaacatctatagcaatgtggaaaaagtaatcaactcatatttcacgaatttgatgtatgttgtgatttagagggcatgagataaagtttatatttgaactgtgtggggtagggggaagaagaggttgcttaagcaaatagtggggtgattgtggaacaagatgtctctaagatgagaagttattttcttgcatcatagaagcactctttttacccgtgagtgattgtgttaactataaatcatttatatctgtacattaaagcagattccctcaattaggcaaatttggttagccaagcccaagttattgtttgtacttgaaagtaataaagctgcatttccttaaaaatatattctgtagttaagactttgtcttgctttccccccaaccacttcagacattttatccaaccaatgcagggacttttcaaaagtcagtgtgtttttgaaaatagaacaaccccttgagtgatctgaggtggctctgtttttttactgtttctgcatcttctagaaggtaaactcaacaatataaccatttctgaaggtgatccaaaaagcaaaacaataaaggtaaaacacaaggaaataattttggtgaatttcatgaatagttgcaaatgaagggatggggtgggtaaaagtcccattttgcttccagaccttggaatagtcttcctctcttttgcccaaggatgtgtctatccagcacatctttgcatgagttctttcttactaacttaaacttacggggcttcttgtcatttgagtaccacggccctgcacctttgatcccctgacagcatcattaagggcagattgtcattcctgttttacagatgagaaagctgtggcttggtaaagtgattcattgcctagaggagttatagtaagtggtgaggctgaagccctgattttcagcccccacacacctggattttttccatgttttcatgtttgtctgttctttctgtatttcaagtctcttcaaatcccgactgctgccttctgccttcaccacttgtgtgcactgttcaacctgtcttatgctttgcttccagggagtctccccaaccacttctttgagcacttacttgctcttgttcaatcttggtaactctccgttaccatcagggcacatctggattccttaacatcatggagccctagctaatttcttcgagcaaacagttcttgctcctctatttatttccacccttgcgctttgggtgttaatctcccatcctcgtggaaagttcttgatgttcctttccaccagtcctagggccaggctttaatcccattgatctcccactatctttaaagcctctgctgaccaccataccccactccagcctcactgagcatttttgtgtaaggttagtggtgcagttcatttagcaataaatactgttgtaccttttgcagtagacaactattaactttcatccttgattctcagttttttccaaaatacaagtgaatacctggtttccccagcaacattgtaagattgagagtaggaattcattgagattttaatgaattccatggattgtcttaagagctatctaaacttggaagaaaaataacttccagagcatctaaaattgaaaataaaagatcagaagcaaatgaaagatcaattccacacagcttttcctctcttagacgtccctcttctgccatatcctgtaaacatctgaagtgttctgagtacatttggagagaatatttaatgatcacactgtgattagacatgagtagtccctgccagtgggatgttcctgtcctttgcattttaaccacatgttctgtgctctctgtggtaaagataatctaacagtaataaaaacttatggagaaaattacccagagctcctttatcattacgatttttaatactctcttctaatccttatgcacatgtgtatggatttatgtactgcaaatcattgttttgtaatacattctcaaaaatgtgctttaggtttttacaactaccataatattttgtaattttccttcattactgtaatttgctaaaccatttctgttttggtagataattaggtagtttccagttctgctttttagaagatactacagagaacttctttgtgcatatttccttagaacaagttccagtagaagacttactcgcaaaagcagtggaattttttcttagtattttctgttacaggtacagaagagtgcatacaacacacagttttgtcgaatagttatgaagtgaacacttgtctaaccactgcccgagtcaagaaagaacatttctaaacatgtttgccaatttaatagatataaaggaagtatctcaaggttgctttaactgacatttctttaacacatgacaacatttttatgggggaggggactagagagaaaatgacatatttttatgtgtgcttatttgtatctcttgaattctgtctgcatcttttacccattacactttcaaatacttgtgaaatcattggtcgagatgaattatggctataaataaaatttcactaatctaattatcactgatttagaaataatagttcaaccc

SEQ ID NO: 109 - DNA, 2303 bp, Homo sapiens
ggggaagggaaaagcgagagcggggcaaggcggaagaggaagcggggcggaagggaagcccgggccgcagacggcgaaggaggcagccgggccgggggctgacgcgggagcgagggcatgcccaagggaggaagcagagggaggcagaagcgtggaggaaggggcgagaggcatcgtcaagggagtcgaggggagcgcaggggccgggaaggaggcacaaggaagagagtatgggaagaaggaggaatggagggtcagggctaggcggcgggagggcgccaggccgggaagagcacagggacgagggggtcaggcttgggccgacatcgcggggacaggggtggccatggcggcggcggccggggaggaggaggaggaggaggaggcggctcgggagtcggctgcccgcccggccgcggggcctgcgctctggcgcctgccggaggagctgctgctgctcatctgctcctacctggacatgcgggccctcggccgcctggcccaggtgtgccgctggctgcggcgcttcaccagctgcgatctgctctggcgccggatagcccgggcctcgctcaactccggcttcacgcggctcggcaccgacctgatgaccagtgtcccagtgaaggaacgagtgaaggtgtctcagaactggagactggggcgctgccgagaggggattctgctgaagtggagatgcagtcagatgccctggatgcagctagaggatgattctctgtacatatcccaggctaatttcatcctggcctaccagttccgtccagatggtgccagcttgaatcgtcggcctctgggagtctttgctgggcatgatgaggacgtttgccactttgtgctggccaactcgcatattgttagtgcaggaggggatgggaagattggcattcataagattcacagcaccttcactgtcaagtactcggctcatgaacaggaggtgaactgtgtggattgcaaagggggcatcattgtgagtggctccagggacaggacggccaaggtgtggcctttggcctcaggccggctggggcagtgcttacacaccatccagactgaagaccgagtctggtccattgctatcagcccattactcagctcttttgtgacagggacggcttgttgcgggcacttctcacccctgagaatctgggacctcaacagtgggcagctgatgacacacttgggcagtgactttcccccaggggctggggtgctggatgtcatgtatgagtcccctttcacactgctgtcctgtggctatgacacctatgttcgctactgggacctccgcaccagcgtccggaaatgtgtcatggagtgggaggagccccacgacagcaccctgtactgcctgcagacagatggcaaccacctgctggccacaggttcctcctactacggtgttgtacggctgtgggaccggcgtcaaagggcctgcctgcacgccttcccgctgacgtcgactcccctcagcagccctgtgtactgcctgcgtctcaccaccaagcatctctatgctgccctgtcttacaacctccacgtcctggattttcaaaacccatgaccgtcagggccacccctgcctctgggccagggaaaccagctactcagggacttctcttgcctggagggtgcagtgatagctcctcctcactgccccactgtgctcctgggcctgtgaccccagtgctcaggcaccttgcactagaggcttctgactcctgggactttggagcttaccagagatgcagtccctcccaggaacctgttggagaggcaggacctgctgctttagagtgcggctgaacccgggccttgcgtccctgtttggccagagcaaggatctggcctggagaggcccatcctataccccttattagagccatgacagcctacagagtgaggtgaggtgctcccaccttcccagatggttcctttctgccccttcctggaaggaaaggtgaggctgccaatagcctcctggcaccagccagacctcacccttgaccaacctctcggggctgggggttcattcctggggcactgtggcctggttttgctttgaaaccaagaaagagcaaagggaacccagcagttctgagtgagttctgagccagccctacctcaggctggctgttgagacatgctacaattttcatttttgtaaaaataaagcttgattgttcacagaaaaaaaaaaaaaaaaaaaaaaaaaaaaaaaaaaaaaaaaaaaaaaaaaaaaaaaaaaaaaaaaaaaaaaaaaaaaaaaaaaaaaaaaaaaa

SEQ ID NO: 110 - DNA, 1219 bp, Homo sapiens
gggagcgggcgagtaggagggggcgccgggctatatatatagcggcctcggcctcgggcgggcctggcgctcagggaggcgcgcactgctcctcagagtcccagctccagccgcgcgctttccgcccggctcgccgctccatgcagccggggtagagcccggcgcccgggggccccgtcgcttgcctcccgcacctcctcggttgcgcactcccgcccgaggtcggccgtgcgctcccgcgggacgccacaggcgcagctctgccccccagcttcccgggcgcactgaccgcctgaccgacgcacgccctcgggccgggatgtcggggcccgggacggccgcggtagcgctgctcccggcggtcctgctggccttgctggcgccctgggcgggccgagggggcgccgccgcacccactgcacccaacggcacgctggaggccgagctggagcgccgctgggagagcctggtggcgctctcgttggcgcgcctgccggtggcagcgcagcccaaggaggcggccgtccagagcggcgccggcgactacctgctgggcatcaagcggctgcggcggctctactgcaacgtgggcatcggcttccacctccaggcgctccccgacggccgcatcggcggcgcgcacgcggacacccgcgacagcctgctggagctctcgcccgtggagcggggcgtggtgagcatcttcggcgtggccagccggttcttcgtggccatgagcagcaagggcaagctctatggctcgcccttcttcaccgatgagtgcacgttcaaggagattctccttcccaacaactacaacgcctacgagtcctacaagtaccccggcatgttcatcgccctgagcaagaatgggaagaccaagaaggggaaccgagtgtcgcccaccatgaaggtcacccacttcctccccaggctgtgaccctccagaggacccttgcctcagcctcgggaagcccctgggagggcagtgcgagggtcaccttggtgcactttcttcggatgaagagtttaatgcaagagtaggtgtaagatatttaaattaattatttaaatgtgtatatattgccaccaaattatttatagttctgcgggtgtgttttttaattttctggggggaaaaaaagacaaaacaaaaaaccaactctgacttttctggtgcaacagtggagaatcttaccattggatttctttaacttgt

SEQ ID NO: 111 - DNA, 8374 bp, Homo sapiens
gcccgcgccggctgtgctgcacagggggaggagagggaaccccaggcgcgagcgggaagaggggacctgcagccacaacttctctggtcctctgcatcccttctgtccctccacccgtccccttccccaccctctggcccccaccttcttggaggcgacaacccccgggaggcattagaagggatttttcccgcaggttgcgaagggaagcaaacttggtggcaacttgcctcccggtgcgggcgtctctcccccaccgtctcaacatgcttaggggtccggggcccgggctgctgctgctggccgtccagtgcctggggacagcggtgccctccacgggagcctcgaagagcaagaggcaggctcagcaaatggttcagccccagtccccggtggctgtcagtcaaagcaagcccggttgttatgacaatggaaaacactatcagataaatcaacagtgggagcggacctacctaggcaatgcgttggtttgtacttgttatggaggaagccgaggttttaactgcgagagtaaacctgaagctgaagagacttgctttgacaagtacactgggaacacttaccgagtgggtgacacttatgagcgtcctaaagactccatgatctgggactgtacctgcatcggggctgggcgagggagaataagctgtaccatcgcaaaccgctgccatgaagggggtcagtcctacaagattggtgacacctggaggagaccacatgagactggtggttacatgttagagtgtgtgtgtcttggtaatggaaaaggagaatggacctgcaagcccatagctgagaagtgttttgatcatgctgctgggacttcctatgtggtcggagaaacgtgggagaagccctaccaaggctggatgatggtagattgtacttgcctgggagaaggcagcggacgcatcacttgcacttctagaaatagatgcaacgatcaggacacaaggacatcctatagaattggagacacctggagcaagaaggataatcgaggaaacctgctccagtgcatctgcacaggcaacggccgaggagagtggaagtgtgagaggcacacctctgtgcagaccacatcgagcggatctggccccttcaccgatgttcgtgcagctgtttaccaaccgcagcctcacccccagcctcctccctatggccactgtgtcacagacagtggtgtggtctactctgtggggatgcagtggctgaagacacaaggaaataagcaaatgctttgcacgtgcctgggcaacggagtcagctgccaagagacagctgtaacccagacttacggtggcaactcaaatggagagccatgtgtcttaccattcacctacaatggcaggacgttctactcctgcaccacagaagggcgacaggacggacatctttggtgcagcacaacttcgaattatgagcaggaccagaaatactctttctgcacagaccacactgttttggttcagactcgaggaggaaattccaatggtgccttgtgccacttccccttcctatacaacaaccacaattacactgattgcacttctgagggcagaagagacaacatgaagtggtgtgggaccacacagaactatgatgccgaccagaagtttgggttctgccccatggctgcccacgaggaaatctgcacaaccaatgaaggggtcatgtaccgcattggagatcagtgggataagcagcatgacatgggtcacatgatgaggtgcacgtgtgttgggaatggtcgtggggaatggacatgcattgcctactcgcagcttcgagatcagtgcattgttgatgacatcacttacaatgtgaacgacacattccacaagcgtcatgaagaggggcacatgctgaactgtacatgcttcggtcagggtcggggcaggtggaagtgtgatcccgtcgaccaatgccaggattcagagactgggacgttttatcaaattggagattcatgggagaagtatgtgcatggtgtcagataccagtgctactgctatggccgtggcattggggagtggcattgccaacctttacagacctatccaagctcaagtggtcctgtcgaagtatttatcactgagactccgagtcagcccaactcccaccccatccagtggaatgcaccacagccatctcacatttccaagtacattctcaggtggagacctaaaaattctgtaggccgttggaaggaagctaccataccaggccacttaaactcctacaccatcaaaggcctgaagcctggtgtggtatacgagggccagctcatcagcatccagcagtacggccaccaagaagtgactcgctttgacttcaccaccaccagcaccagcacacctgtgaccagcaacaccgtgacaggagagacgactcccttttctcctcttgtggccacttctgaatctgtgaccgaaatcacagccagtagctttgtggtctcctgggtctcagcttccgacaccgtgtcgggattccgggtggaatatgagctgagtgaggagggagatgagccacagtacctggatcttccaagcacagccacttctgtgaacatccctgacctgcttcctggccgaaaatacattgtaaatgtctatcagatatctgaggatggggagcagagtttgatcctgtctacttcacaaacaacagcgcctgatgcccctcctgacccgactgtggaccaagttgatgacacctcaattgttgttcgctggagcagaccccaggctcccatcacagggtacagaatagtctattcgccatcagtagaaggtagcagcacagaactcaaccttcctgaaactgcaaactccgtcaccctcagtgacttgcaacctggtgttcagtataacatcactatctatgctgtggaagaaaatcaagaaagtacacctgttgtcattcaacaagaaaccactggcaccccacgctcagatacagtgccctctcccagggacctgcagtttgtggaagtgacagacgtgaaggtcaccatcatgtggacaccgcctgagagtgcagtgaccggctaccgtgtggatgtgatccccgtcaacctgcctggcgagcacgggcagaggctgcccatcagcaggaacacctttgcagaagtcaccgggctgtcccctggggtcacctattacttcaaagtctttgcagtgagccatgggagggagagcaagcctctgactgctcaacagacaaccaaactggatgctcccactaacctccagtttgtcaatgaaactgattctactgtcctggtgagatggactccacctcgggcccagataacaggataccgactgaccgtgggccttacccgaagaggacagcccaggcagtacaatgtgggtccctctgtctccaagtacccactgaggaatctgcagcctgcatctgagtacaccgtatccctcgtggccataaagggcaaccaagagagccccaaagccactggagtctttaccacactgcagcctgggagctctattccaccttacaacaccgaggtgactgagaccaccattgtgatcacatggacgcctgctccaagaattggttttaagctgggtgtacgaccaagccagggaggagaggcaccacgagaagtgacttcagactcaggaagcatcgttgtgtccggcttgactccaggagtagaatacgtctacaccatccaagtcctgagagatggacaggaaagagatgcgccaattgtaaacaaagtggtgacaccattgtctccaccaacaaacttgcatctggaggcaaaccctgacactggagtgctcacagtctcctgggagaggagcaccaccccagacattactggttatagaattaccacaacccctacaaacggccagcagggaaattctttggaagaagtggtccatgctgatcagagctcctgcacttttgataacctgagtcccggcctggagtacaatgtcagtgtttacactgtcaaggatgacaaggaaagtgtccctatctctgataccatcatcccagctgttcctcctcccactgacctgcgattcaccaacattggtccagacaccatgcgtgtcacctgggctccacccccatccattgatttaaccaacttcctggtgcgttactcacctgtgaaaaatgaggaagatgttgcagagttgtcaatttctccttcagacaatgcagtggtcttaacaaatctcctgcctggtacagaatatgtagtgagtgtctccagtgtctacgaacaacatgagagcacacctcttagaggaagacagaaaacaggtcttgattccccaactggcattgacttttctgatattactgccaactcttttactgtgcactggattgctcctcgagccaccatcactggctacaggatccgccatcatcccgagcacttcagtgggagacctcgagaagatcgggtgccccactctcggaattccatcaccctcaccaacctcactccaggcacagagtatgtggtcagcatcgttgctcttaatggcagagaggaaagtcccttattgattggccaacaatcaacagtttctgatgttccgagggacctggaagttgttgctgcgacccccaccagcctactgatcagctgggatgctcctgctgtcacagtgagatattacaggatcacttacggagagacaggaggaaatagccctgtccaggagttcactgtgcctgggagcaagtctacagctaccatcagcggccttaaacctggagttgattataccatcactgtgtatgctgtcactggccgtggagacagccccgcaagcagcaagccaatttccattaattaccgaacagaaattgacaaaccatcccagatgcaagtgaccgatgttcaggacaacagcattagtgtcaagtggctgccttcaagttcccctgttactggttacagagtaaccaccactcccaaaaatggaccaggaccaacaaaaactaaaactgcaggtccagatcaaacagaaatgactattgaaggcttgcagcccacagtggagtatgtggttagtgtctatgctcagaatccaagcggagagagtcagcctctggttcagactgcagtaaccaacattgatcgccctaaaggactggcattcactgatgtggatgtcgattccatcaaaattgcttgggaaagcccacaggggcaagtttccaggtacagggtgacctactcgagccctgaggatggaatccatgagctattccctgcacctgatggtgaagaagacactgcagagctgcaaggcctcagaccgggttctgagtacacagtcagtgtggttgccttgcacgatgatatggagagccagcccctgattggaacccagtccacagctattcctgcaccaactgacctgaagttcactcaggtcacacccacaagcctgagcgcccagtggacaccacccaatgttcagctcactggatatcgagtgcgggtgacccccaaggagaagaccggaccaatgaaagaaatcaaccttgctcctgacagctcatccgtggttgtatcaggacttatggtggccaccaaatatgaagtgagtgtctatgctcttaaggacactttgacaagcagaccagctcagggagttgtcaccactctggagaatgtcagcccaccaagaagggctcgtgtgacagatgctactgagaccaccatcaccattagctggagaaccaagactgagacgatcactggcttccaagttgatgccgttccagccaatggccagactccaatccagagaaccatcaagccagatgtcagaagctacaccatcacaggtttacaaccaggcactgactacaagatctacctgtacaccttgaatgacaatgctcggagctcccctgtggtcatcgacgcctccactgccattgatgcaccatccaacctgcgtttcctggccaccacacccaattccttgctggtatcatggcagccgccacgtgccaggattaccggctacatcatcaagtatgagaagcctgggtctcctcccagagaagtggtccctcggccccgccctggtgtcacagaggctactattactggcctggaaccgggaaccgaatatacaatttatgtcattgccctgaagaataatcagaagagcgagcccctgattggaaggaaaaagacagttcaaaagacccctttcgtcacccaccctgggtatgacactggaaatggtattcagcttcctggcacttctggtcagcaacccagtgttgggcaacaaatgatctttgaggaacatggttttaggcggaccacaccgcccacaacggccacccccataaggcataggccaagaccatacccgccgaatgtaggacaagaagctctctctcagacaaccatctcatgggccccattccaggacacttctgagtacatcatttcatgtcatcctgttggcactgatgaagaacccttacagttcagggttcctggaacttctaccagtgccactctgacaggcctcaccagaggtgccacctacaacatcatagtggaggcactgaaagaccagcagaggcataaggttcgggaagaggttgttaccgtgggcaactctgtcaacgaaggcttgaaccaacctacggatgactcgtgctttgacccctacacagtttcccattatgccgttggagatgagtgggaacgaatgtctgaatcaggctttaaactgttgtgccagtgcttaggctttggaagtggtcatttcagatgtgattcatctagatggtgccatgacaatggtgtgaactacaagattggagagaagtgggaccgtcagggagaaaatggccagatgatgagctgcacatgtcttgggaacggaaaaggagaattcaagtgtgaccctcatgaggcaacgtgttatgatgatgggaagacataccacgtaggagaacagtggcagaaggaatatctcggtgccatttgctcctgcacatgctttggaggccagcggggctggcgctgtgacaactgccgcagacctgggggtgaacccagtcccgaaggcactactggccagtcctacaaccagtattctcagagataccatcagagaacaaacactaatgttaattgcccaattgagtgcttcatgcctttagatgtacaggctgacagagaagattcccgagagtaaatcatctttccaatccagaggaacaagcatgtctctctgccaagatccatctaaactggagtgatgttagcagacccagcttagagttcttctttctttcttaagccctttgctctggaggaagttctccagcttcagctcaactcacagcttctccaagcatcaccctgggagtttcctgagggttttctcataaatgagggctgcacattgcctgttctgcttcgaagtattcaataccgctcagtattttaaatgaagtgattctaagatttggtttgggatcaataggaaagcatatgcagccaaccaagatgcaaatgttttgaaatgatatgaccaaaattttaagtaggaaagtcacccaaacacttctgctttcacttaagtgtctggcccgcaatactgtaggaacaagcatgatcttgttactgtgatattttaaatatccacagtactcactttttccaaatgatcctagtaattgcctagaaatatctttctcttacctgttatttatcaatttttcccagtatttttatacggaaaaaattgtattgaaaacacttagtatgcagttgataagaggaatttggtataattatggtgggtgattattttttatactgtatgtgccaaagctttactactgtggaaagacaactgttttaataaaagatttacattccacaacttgaagttcatctatttgatataagacaccttcgggggaaataattcctgtgaatattctttttcaattcagcaaacatttgaaaatctatgatgtgcaagtctaattgttgatttcagtacaagattttctaaatcagttgctacaaaaactgattggtttttgtcacttcatctcttcactaatggagatagctttacactttctgctttaatagatttaagtggaccccaatatttattaaaattgctagtttaccgttcagaagtataatagaaataatctttagttgctcttttctaaccattgtaattcttcccttcttccctccacctttccttcattgaataaacctctgttcaaagagattgcctgcaagggaaataaaaatgactaagatattaaaaaaaaaaaaaaaaaa

SEQ ID NO: 112 - DNA, 1668 bp, Homo sapiens
acgggccaaggcggcgcgtctcgggggtggagcctggaggtgaccgcgccgctgcaacgcccccaccccccgcggtcgcagtggttcagcccgagaacttttcattcataaaaagaaaagactccgcacggcgcgggtgagtcagaacccagcagccgtgtaccccgcagagccgccagccccgggcatgttccgagacttcggggaacccggcccgagctccgggaacggcggcgggtacggcggccccgcgcagcccccggccgcagcgcaggcagcccagcagaagttccacctggtgccaagcatcaacaccatgagtggcagtcaggagctgcagtggatggtacagcctcatttcctggggcccagcagttaccccaggcctctgacctaccctcagtacagccccccacaaccccggccaggagtcatccgggccctggggccgcctccaggggtacgtcgaaggccttgtgaacagatcagcccggaggaagaggagcgccgccgagtaaggcgcgagcggaacaagctggctgcggccaagtgcaggaaccggaggaaggaactgaccgacttcctgcaggcggagactgacaaactggaagatgagaaatctgggctgcagcgagagattgaggagctgcagaagcagaaggagcgcctagagctggtgctggaagcccaccgacccatctgcaaaatcccggaaggagccaaggagggggacacaggcagtaccagtggcaccagcagcccaccagccccctgccgccctgtaccttgtatctccctttccccagggcctgtgcttgaacctgaggcactgcacacccccacactcatgaccacaccctccctaactcctttcacccccagcctggtcttcacctaccccagcactcctgagccttgtgcctcagctcatcgcaagagtagcagcagcagcggagacccatcctctgacccccttggctctccaaccctcctcgctttgtgaggcgcctgagccctactccctgcagatgccaccctagccaatgtctcctccccttcccccaccggtccagctggcctggacagtatcccacatccaactccagcaacttcttctccatccctctaatgagactgaccatattgtgcttcacagtagagccagcttggggccaccaaagctgcccactgtttctcttgagctggcctctctagcacaatttgcactaaatcagagacaaaatatttcccatttgtgccagaggaatcctggcagcccagagactttgtagatccttagaggtcctctggagccctaaccccttccagatcactgccacactctccatcaccctcttcctgtgatccacccaaccctatctcctgacagaaggtgccactttacccacctagaacactaactcaccagccccactgccagcagcagcaggtgattggaccaggccattctgccgccccctcctgaaccgcacagctcaggaggcgcccttggcttctgtgatgagctgatctgcggatctcagctttgagaagccttcagctccagggaatccaagcctccacagcgagggcagctgctatttattttcctaaagagagtatttttatacaaacctaccaaaatggaataaaaggcttgaagctgtg

SEQ ID NO: 113 - DNA, 2697 bp, Homo sapiens
acggctttctttgaggccaggactgggtgatggtgtcgctacccccgccgcagtctgacgtcacgctgccgggccccaccagactggagggcgagcgccaaggggacctcatgcaggcaccgggcctcccaggctcccctgccccacagagtaagcatgccggcttcagctgctcgtcatttgtgtccgacggccctccagagaggacaccctcactgcccccacacagcccccgcattgcgtcaccagggcccgagcaagtccagggccactgcccagccggccccggccctgggcccttcaggctctcaccctcagacaagtatcctggctttggctttgaggaggccgcagcaagcagccctgggcgattcctcaagggcagccacgcgcccttccacccgtacaagcggcctttccatgaggacgtcttcccagaggccgagaccaccctggccctcaaaggacactcctttaagaccccagggccgctggaggccttcgaggagatcccagtggacgtggcggaggccgaggccttcctgcctggcttctcagcagaggcctggtgtaacgggctcccctaccccagccaggagcatggcccccaagtcctgggttcagaggtcaaagtcaagcccccagttctggagagtggtgctgggatgttctgctaccagcctcccttgcagcatatgtactgctcctcccagccccccttccaccagtactcgccaggtggtggcagctaccccataccctacctgggctcctcacactatcagtaccagcgaatggcaccccaggccagcaccgatgggcaccagcctctcttcccaaaacccatctattcctacagcatcctcatcttcatggcccttaagaacagtaaaactgggagccttcccgtcagcgagatctacaattttatgacggagcactttccttacttcaagacagcacccgatggctggaagaattctgtccggcacaacctatccctcaacaagtgcttcgagaaggtggagaacaaatcaggaagttcctcccgcaagggctgcctgtgggccctcaatccggccaagatcgacaagatgcaagaggagctgcaaaaatggaagaggaaagatcccattgctgtgcgcaaaagcatggccaagccagaagagctggacagcctcattggagacaagagagaaaagctgggctccccactcctgggctgtccgccccctgggctgtccggctcaggccccatccggcccctggcacccccagctggcctctccccaccactgcactcactccacccagctccaggccccattcctggcaagaaccccctgcaggacctacttatggggcacacaccctcctgctatgggcagacatacttgcacctctcaccaggcctggcccctcctggacccccgcagccattgttcccacagccggacgggcaccttgagctgcgggcccagccaggcaccccccaggactcgcctctgcctgcccacaccccacccagccacagtgccaagctactggccgagccttccccagccaggactatgcacgacaccctgctgccagatggagaccttggcactgacctggatgccatcaatccctcactcactgacttcgacttccagggaaacctgtgggaacagttgaaggatgatagcttggccctcgaccccctggtactggtgacctcatccccgacatcatcttcgatgccaccaccccagccaccacctcactgcttcccccctgggccctgtctgacagagacaggcagtggggcaggtgacttggcagccccgggcagtggtggctccggggcactgggtgacctgcacctcaccaccctctactctgcctttatggagctggagcccacgccccccacggcccctgcaggcccctctgtgtacctcagccccagctccaagcccgtggccctggcatgagctgtgcccagcttcgtcagctccagcgtttgcctggtctggaagtcctggccggccgcccacatcgggctcaccttaaaggtcaaggaaggaaaatactacctgtcccctatgccactaagccaacgtgtgtgtcagctggtagctgggggcgcagaggacatcacctggggtgctgcctctcacacatttctgccacgtggtggcccagctcctcacccagggcccccaaagagcaagcgtctgggcaagaggaaaatgccctgtccctagctcacactcatccacacttaagccctcgtgcacacacacaaattattcagatgtacacccacccacatatcttacagccagaggaaccagcactccatcactgagagcccgacttcgtttctggggcaactgagagctgagcgctttgcttaccaaaagctcagggccctgtgccaggccaaagatccccccagacccccattctgacatccacatgctctgcagtcctggccccctcgtcattttctttcccagaagcgccctgtatttattcccccatcttcatcccaacagcccagcaagaaggaggagacagagagctcctccctgggttgtctgtggacccccccaggagctgctaattggcagcacccactcagccattctctacccatccttagtacatgctctgtccagctttccccagggtgacatacagaaggggcaa

SEQ ID NO: 114 - DNA, 7314 bp, Homo sapiens
ctgctcgtggaagggaggaggaggaatgtggaaggtggcggcgcgcgagctgacaggcggttcctcgggcgggctgcggcgacggcccgagcgcttctccttcgccgaggttgcgcgccccctcctcgccgtgccccgggcccgcgcgggatcgtgcgtcgtcccgccgcgtccctgaagggaaggaagcgaggcggcggcggcggcgcccgggagccggagccttcgcggcgtccacgtccctcccccgctgcaccccgccccggcgcgagaggagagcgcgagagccccagccgcgggcgggcgggcggcgaagatggcagaggcaccggcttccccggccccgctctctccgctcgaagtggagctggacccggagttcgagccccagagccgtccgcgatcctgtacgtggcccctgcaaaggccggagctccaagcgagccctgccaagccctcgggggagacggccgccgactccatgatccccgaggaggaggacgatgaagacgacgaggacggcgggggacgggccggctcggccatggcgatcggcggcggcggcgggagcggcacgctgggctccgggctgctccttgaggactcggcccgggtgctggcacccggagggcaagaccccgggtctgggccagccaccgcggcgggcgggctgagcgggggtacacaggcgctgctgcagcctcagcaaccgctgccaccgccgcagccgggggcggctgggggctccgggcagccgaggaaatgttcgtcgcggcggaacgcctggggaaacctgtcctacgcggacctgatcacccgcgccatcgagagctccccggacaaacggctcactctgtcccagatctacgagtggatggtgcgttgcgtgccctacttcaaggataagggcgacagcaacagctctgccggctggaagaactccatccggcacaacctgtcactgcatagtcgattcatgcgggtccagaatgagggaactggcaagagctcttggtggatcatcaaccctgatggggggaagagcggaaaagccccccggcggcgggctgtctccatggacaatagcaacaagtataccaagagccgtggccgcgcagccaagaagaaggcagccctgcagacagcccccgaatcagctgacgacagtccctcccagctctccaagtggcctggcagccccacgtcacgcagcagtgatgagctggatgcgtggacggacttccgttcacgcaccaattctaacgccagcacagtcagtggccgcctgtcgcccatcatggcaagcacagagttggatgaagtccaggacgatgatgcgcctctctcgcccatgctctacagcagctcagccagcctgtcaccttcagtaagcaagccgtgcacggtggaactgccacggctgactgatatggcaggcaccatgaatctgaatgatgggctgactgaaaacctcatggacgacctgctggataacatcacgctcccgccatcccagccatcgcccactgggggactcatgcagcggagctctagcttcccgtataccaccaagggctcgggcctgggctccccaaccagctcctttaacagcacggtgttcggaccttcatctctgaactccctacgccagtctcccatgcagaccatccaagagaacaagccagctaccttctcttccatgtcacactatggtaaccagacactccaggacctgctcacttcggactcacttagccacagcgatgtcatgatgacacagtcggaccccttgatgtctcaggccagcaccgctgtgtctgcccagaattcccgccggaacgtgatgcttcgcaatgatccgatgatgtcctttgctgcccagcctaaccagggaagtttggtcaatcagaacttgctccaccaccagcaccaaacccagggcgctcttggtggcagccgtgccttgtcgaattctgtcagcaacatgggcttgagtgagtccagcagccttgggtcagccaaacaccagcagcagtctcctgtcagccagtctatgcaaaccctctcggactctctctcaggctcctccttgtactcaactagtgcaaacctgcccgtcatgggccatgagaagttccccagcgacttggacctggacatgttcaatgggagcttggaatgtgacatggagtccattatccgtagtgaactcatggatgctgatgggttggattttaactttgattccctcatctccacacagaatgttgttggtttgaacgtggggaacttcactggtgctaagcaggcctcatctcagagctgggtgccaggctgaaggatcactgaggaaggggaagtgggcaaagcagaccctcaaactgacacaagacctacagagaaaaccctttgccaaatctgctctcagcaagtggacagtgataccgtttacagcttaacacctttgtgaatcccacgccattttcctaacccagcagagactgttaatggccccttaccctgggtgaagcacttacccttggaacagaactctaaaaagtatgcaaaatcttccttgtacagggtggtgagccgcctgccagtggaggacagcacccctcagcaccacccaccctcattcagagcacaccgtgagcccccgtcggccattctgtggtgttttaatattgcgatggtttatgggacgttttaagtgttgttcttgtgtttgttttcctttgactttctgagtttttcacatgcattaacttgcggtatttttctgttaaaatgttaaccgtccttcccctagcaaatttaaaaacagaaagaaaatgttgtaccagttaccattccgggttcgagcatcacaagcttttgagcgcatggaactccataaactaacaaattacataaactaaagggggattttctttcttcttttgtttggtagaaaattatccttttctaaaaactgaacaatggcacaattgtttgctatgtgcacccgtccaggacagaaccgtgcataggcaaaaggagtggagcacagcgtccggcccagtgtgtttccggttctgagtcagggtgatctgtggacgggaccccagcaccaagtctacgggtgccagatcagtagggcctgtgatttcctgtcagtgtcctcagctaatgtgaacagtgttggtctgctggttagaaactagaatattgatattttcaggaaagaaatcagctcagctctccactcattgccaaatgtcactaaagggtttagttttaaggagaaagaaaaggaaaaaaaaaaaaaacaaaaaagtcctgttttgctttgcagaacaaatgaacttacaggtgagcattaagcttgcagtgagaaatgtgcgaagagtaaaaacccaagtcaatgctgaggcagttctaacttcactgttttcctaaatacacatccttgattattttcagccttgctatataatctgatctgctagaagtgtatgagtgagaggcaatagcatacaaactgattttttaaatataagcttaggttgtaattgtacaagtgactcaatggaagtacaaaatagggcagttttaacttttttttctgcttctatggatttcattttgttgtgttttcaaaaagttatggtgctgtataggtgctttctgtttaacctggaaagtgtgattatattcgttaccttctttggtagacggaatagttgggaccacctttggtacataagaaattggtataacgatgctctgattagcacagtatatgcatacttctccaaagtgatatatgaagactcttttctttgcataaaaagcattaggcatataaatgtataaatatattttatcatgtacagtacaaaaatggaaccttatgcatgggccttaggaatacaggctagtatttcagcacagacttccctgcttgagttcttgctgatgcttgcaccgtgacagtgggcaccaacacagacgtgccacccaaccccctgcacacaccaccggccaccaggggcccccttgtgcgccttggctttataactcctctgggggtgatattggtggtgatcacagctcctagcataatgagagttccatttggtattgtcacacgtctcctgcctcgcttgggttgccatgtttgagcgatggccctgttgatttcaccctgccttttactgaatctgtaaattgttgtgcaattgtggttatagtagactgtagcacattgccttttctaaactgctacatgtttataatcttcatttttaaagtatgtgtaatttttttaagtatgtattctattcatatggtctgcttgtcagtgagccagacttgcttactatattcctttataataatgctagccacttcctggattctttagtaatgtgctgtatgcaagaactttccagtagcagtgaaggagggttgcctctccaagcttcctaagggatgctgccctgtgtggggatgcattgcagaggcactagtagcatgggggctagagtggggagcgagatgtaaaagggtggggggataggagaattccagagtgcttccagcattagggtcctgagaacttctgagttcagagaaacatgcaaagtgactaacaaaatagctacttacctttgcagttttacagaccctgggagctgctttgggagtgagaaaggcaaccctccaatgtgtttcaactttaaaatgttgaattcttttcagacatggtatctcatttattctccttttctagcgtttgttgaatttcaggcagaatgtcttacagaatgtcctagaaccagattatcatttaatctgaaacagctgaggaagggacagagaaggtacaagggcaaggcagcacaaaacagatcaggagaatgaagagggaatgctttggttttttgttttgttttgttttttctttttcaagtaactaaaacagcatctacatgtagagtgttgtggagagctgagaccagggtaaagtcaagtgcagcatcagtactgcgagacccaccagcccctggagagggtcagccgagaatctggtagtgaagcctgtctagggtcccggcaccctcaccctcagccacctgcagagaggccagggccccagagactagcctggttctgaagtgggcaggggtgctgccagagccctctgccccttatgttgagaccctgctttcaggacaggccagccgttggccaccatgtcacattctgagtgagtgtcacaggtccctaacaataattttctgatctggagcatatcagcagaatgcttagcctcaaggggcctggcagctgtaatgtttgatttatgatgagaactatccgaggccacccttggcctctaaataagctgctctagggagccgcctactttttgatgagaaattagaagagtacctaatgttgaaaacatgacatgcgctcttgggatctgctgttctctccagggctccagaacctgatacctgttaccaaagctaggaaagagctttatcacaagccttcactgtcctggcatgagaactggctgccaggctcagtgtaccccattaactgtgaatgaatctgagcttggtttcctttattgcttcctctgcaatatgattgctgaaacacattttaaaaattcagaagcttgtcactcctgttaatgggaggatcagtcacacatgtgtagtacaaggcggactttgtgtttgtttttggtgttaatttttagcattgtgtgtgttgcttccccaccctgaggagaggacaccatggcttactactcaggacaagtatgccccgctcagggtgtgatttcaggtggcttccaaacttgtacgcagtttaaagatggtggggacagactttgcctctacctagtgaaccccacttaaagaataaggagcatttgaatctcttggaaaaggccatgaagaataaagcagtcaaaaagaagtcctccatgttggtgccaaggacttgcgaggggaaataaaaatgttatccagcctgaccaacatggagaaaccccgtctccattaaaaatacaaaattagcctggcatggtggcgcatgcctgtaatcccagctactctggaggctgaggcaggagaatcgcttgaacccaggaggcggaggtcgcagtgagccgagatcatgccagtgcactccagcctgggtaacaagagtgaaactccgtgtcaaaaaaaaaaaaaaaatgttactcatcctctctgaaagcaaaaaggaaaccctaacagctctgaactctggttttatttttcttgctgtatttgggtgaacattgtatgattaggcataatgttaaaaaaaaaaatttttttttggtagaaatgcaatcaccagtaaagaggtacgaaaaagctagcctctctcagagaccggggaggcagagtactactagaggaagtgaagttctgatggaatcatgcctgtcaaatgaggtcttgaagcggatgcccaaataaaagagtatattttatctaaatcttaagtgggtaacattttatgcagtttaaatgaatggaatattttcctcttgtttagttgtatctgtttgtatttttctttgatgaatgattggtcatgaggcctcttgccacactccagaaatacgtgtgcggctgcttttaagaactatgtgtctggtcacttatttctctaaaattatctcattgcctggcaatcagtcttctcttgtatacttgtcctagcacattatgtacatgggaaatgtaaacaaatgtgaaggaggaccagaaaaattagttaatatttaaaaaaatgtattgtgcattttggcttcacatgtttaactttttttaagaaaaaagttgcatgaatggaaaaaaaaatctgtatacagtatctgtaaaaactatcttatctgtttcaattccttgctcatatcccatataatctagaactaaatatggtgtgtggccatatttaaacacctgagagtcaagcagttgagactttgatttgaagcacctcatccttctttcaatgcgaacactatcatatggcattcttactgaggattttgtctaaccatatgttgccatgaattaactctgccgcctttcttaaggatcaaaaccagtttgatttgggaatcttcccctttccaaatgaaatagagatgcagtacttaactttccttggtgtttgtagatattgccttgtgtattccacttaaaaccgtaatctagtttgtaaaagagatggtgacgcatgtaaataaagcatcagtgacactct

SEQ ID NO: 115 - DNA, 8680 bp, Homo sapiens
acggggcctgaagcggcggtaccggtgctggcggcggcagctgaggccttggccgaagccgcgcgaacctcagggcaagatgcttggaaccggacctgccgccgccaccaccgctgccaccacatctagcaatgtgagcgtcctgcagcagtttgccagtggcctaaagagccggaatgaggaaaccagggccaaagccgccaaggagctccagcactatgtcaccatggaactccgagagatgagtcaagaggagtctactcgcttctatgaccaactgaaccatcacatttttgaattggtttccagctcagatgccaatgagaggaaaggtggcatcttggccatagctagcctcataggagtggaaggtgggaatgccacccgaattggcagatttgccaactatcttcggaacctcctcccctccaatgacccagttgtcatggaaatggcatccaaggccattggccgtcttgccatggcaggggacacttttaccgctgagtacgtggaatttgaggtgaagcgagccctggaatggctgggtgctgaccgcaatgagggccggagacatgcagctgtcctggttctccgtgagctggccatcagcgtccctaccttcttcttccagcaagtgcaacccttctttgacaacatttttgtggccgtgtgggaccccaaacaggccatccgtgagggagctgtagccgcccttcgtgcctgtctgattctcacaacccagcgtgagccgaaggagatgcagaagcctcagtggtacaggcacacatttgaagaagcagagaagggatttgatgagaccttggccaaagagaagggcatgaatcgggatgatcggatccatggagccttgttgatccttaacgagctggtccgaatcagcagcatggagggagagcgtctgagagaagaaatggaagaaatcacacagcagcagctggtacacgacaagtactgcaaagatctcatgggcttcggaacaaaacctcgtcacattacccccttcaccagtttccaggctgtacagccccagcagtcaaatgccttggtggggctgctggggtacagctctcaccaaggcctcatgggatttgggacctcccccagtccagctaagtccaccctggtggagagccggtgttgcagagacttgatggaggagaaatttgatcaggtgtgccagtgggtgctgaaatgcaggaatagcaagaactcgctgatccaaatgacaatccttaatttgttgccccgcttggctgcattccgaccttctgccttcacagatacccagtatctccaagataccatgaaccatgtcctaagctgtgtcaagaaggagaaggaacgtacagcggccttccaagccctggggctactttctgtggctgtgaggtctgagtttaaggtctatttgcctcgcgtgctggacatcatccgagcggccctgcccccaaaggacttcgcccataagaggcagaaggcaatgcaggtggatgccacagtcttcacttgcatcagcatgctggctcgagcaatggggccaggcatccagcaggatatcaaggagctgctggagcccatgctggcagtgggactaagccctgccctcactgcagtgctctacgacctgagccgtcagattccacagctaaagaaggacattcaagatgggctactgaaaatgctgtccctggtccttatgcacaaaccccttcgccacccaggcatgcccaagggcctggcccatcagctggcctctcctggcctcacgaccctccctgaggccagcgatgtgggcagcatcactcttgccctccgaacgcttggcagctttgaatttgaaggccactctctgacccaatttgttcgccactgtgcggatcatttcctgaacagtgagcacaaggagatccgcatggaggctgcccgcacctgctcccgcctgctcacaccctccatccacctcatcagtggccatgctcatgtggttagccagaccgcagtgcaagtggtggcagatgtgcttagcaaactgctcgtagttgggataacagatcctgaccctgacattcgctactgtgtcttggcgtccctggacgagcgctttgatgcacacctggcccaggcggagaacttgcaggccttgtttgtggctctgaatgaccaggtgtttgagatccgggagctggccatctgcactgtgggccgactcagtagcatgaaccctgcctttgtcatgcctttcctgcgcaagatgctcatccagattttgacagagttggagcacagtgggattggaagaatcaaagagcagagtgcccgcatgctggggcacctggtctccaatgccccccgactcatccgcccctacatggagcctattctgaaggcattaattttgaaactgaaagatccagaccctgatccaaacccaggtgtgatcaataatgtcctggcaacaataggagaattggcacaggttagtggcctggaaatgaggaaatgggttgatgaactttttattatcatcatggacatgctccaggattcctctttgttggccaaaaggcaggtggctctgtggaccctgggacagttggtggccagcactggctatgtagtagagccctacaggaagtaccctactttgcttgaggtgctactgaattttctgaagactgagcagaaccagggtacacgcagagaggccatccgtgtgttagggcttttaggggctttggatccttacaagcacaaagtgaacattggcatgatagaccagtcccgggatgcctctgctgtcagcctgtcagaatccaagtcaagtcaggattcctctgactatagcactagtgaaatgctggtcaacatgggaaacttgcctctggatgagttctacccagctgtgtccatggtggccctgatgcggatcttccgagaccagtcactctctcatcatcacaccatggttgtccaggccatcaccttcatcttcaagtccctgggactcaaatgtgtgcagttcctgccccaggtcatgcccacgttccttaacgtcattcgagtctgtgatggggccatccgggaatttttgttccagcagctgggaatgttggtgtcctttgtgaagagccacatcagaccttatatggatgaaatagtcaccctcatgagagaattctgggtcatgaacacctcaattcagagcacgatcattcttctcattgagcaaattgtggtagctcttgggggtgaatttaagctctacctgccccagctgatcccacacatgctgcgtgtcttcatgcatgacaacagcccaggccgcattgtctctatcaagttactggctgcaatccagctgtttggcgccaacctggatgactacctgcatttactgctgcctcctattgttaagttgtttgatgcccctgaagctccactgccatctcgaaaggcagcgctagagactgtggaccgcctgacggagtccctggatttcactgactatgcctcccggatcattcaccctattgttcgaacactggaccagagcccagaactgcgctccacagccatggacacgctgtcttcacttgtttttcagctggggaagaagtaccaaattttcattccaatggtgaataaagttctggtgcgacaccgaatcaatcatcagcgctatgatgtgctcatctgcagaattgtcaagggatacacacttgctgatgaagaggaggatcctttgatttaccagcatcggatgcttaggagtggccaaggggatgcattggctagtggaccagtggaaacaggacccatgaagaaactgcacgtcagcaccatcaacctccaaaaggcctggggcgctgccaggagggtctccaaagatgactggctggaatggctgagacggctgagcctggagctgctgaaggactcatcatcgccctccctgcgctcctgctgggccctggcacaggcctacaacccgatggccagggatctcttcaatgctgcatttgtgtcctgctggtctgaactgaatgaagatcaacaggatgagctcatcagaagcatcgagttggccctcacctcacaagacatcgctgaagtcacacagaccctcttaaacttggctgaattcatggaacacagtgacaagggccccctgccactgagagatgacaatggcattgttctgctgggtgagagagctgccaagtgccgagcatatgccaaagcactacactacaaagaactggagttccagaaaggccccacccctgccattctagaatctctcatcagcattaataataagctacagcagccggaggcagcggccggagtgttagaatatgccatgaaacactttggagagctggagatccaggctacctggtatgagaaactgcacgagtgggaggatgcccttgtggcctatgacaagaaaatggacaccaacaaggacgacccagagctgatgctgggccgcatgcgctgcctcgaggccttgggggaatggggtcaactccaccagcagtgctgtgaaaagtggaccctggttaatgatgagacccaagccaagatggcccggatggctgctgcagctgcatggggtttaggtcagtgggacagcatggaagaatacacctgtatgatccctcgggacacccatgatggggcattttatagagctgtgctggcactgcatcaggacctcttctccttggcacaacagtgcattgacaaggccagggacctgctggatgctgaattaactgcgatggcaggagagagttacagtcgggcatatggggccatggtttcttgccacatgctgtccgagctggaggaggttatccagtacaaacttgtccccgagcgacgagagatcatccgccagatctggtgggagagactgcagggctgccagcgtatcgtagaggactggcagaaaatccttatggtgcggtcccttgtggtcagccctcatgaagacatgagaacctggctcaagtatgcaagcctgtgcggcaagagtggcaggctggctcttgctcataaaactttagtgttgctcctgggagttgatccgtctcggcaacttgaccatcctctgccaacagttcaccctcaggtgacctatgcctacatgaaaaacatgtggaagagtgcccgcaagatcgatgccttccagcacatgcagcattttgtccagaccatgcagcaacaggcccagcatgccatcgctactgaggaccagcagcataagcaggaactgcacaagctcatggcccgatgcttcctgaaacttggagagtggcagctgaatctacagggcatcaatgagagcacaatccccaaagtgctgcagtactacagcgccgccacagagcacgaccgcagctggtacaaggcctggcatgcgtgggcagtgatgaacttcgaagctgtgctacactacaaacatcagaaccaagcccgcgatgagaagaagaaactgcgtcatgccagcggggccaacatcaccaacgccaccactgccgccaccacggccgccactgccaccaccactgccagcaccgagggcagcaacagtgagagcgaggccgagagcaccgagaacagccccaccccatcgccgctgcagaagaaggtcactgaggatctgtccaaaaccctcctgatgtacacggtgcctgccgtccagggcttcttccgttccatctccttgtcacgaggcaacaacctccaggatacactcagagttctcaccttatggtttgattatggtcactggccagatgtcaatgaggccttagtggagggggtgaaagccatccagattgatacctggctacaggttatacctcagctcattgcaagaattgatacgcccagacccttggtgggacgtctcattcaccagcttctcacagacattggtcggtaccacccccaggccctcatctacccactgacagtggcttctaagtctaccacgacagcccggcacaatgcagccaacaagattctgaagaacatgtgtgagcacagcaacaccctggtccagcaggccatgatggtgagcgaggagctgatccgagtggccatcctctggcatgagatgtggcatgaaggcctggaagaggcatctcgtttgtactttggggaaaggaacgtgaaaggcatgtttgaggtgctggagcccttgcatgctatgatggaacggggcccccagactctgaaggaaacatcctttaatcaggcctatggtcgagatttaatggaggcccaagagtggtgcaggaagtacatgaaatcagggaatgtcaaggacctcacccaagcctgggacctctattatcatgtgttccgacgaatctcaaagcagctgcctcagctcacatccttagagctgcaatatgtttccccaaaacttctgatgtgccgggaccttgaattggctgtgccaggaacatatgaccccaaccagccaatcattcgcattcagtccatagcaccgtctttgcaagtcatcacatccaagcagaggccccggaaattgacacttatgggcagcaacggacatgagtttgttttccttctaaaaggccatgaagatctgcgccaggatgagcgtgtgatgcagctcttcggcctggttaacacccttctggccaatgacccaacatctcttcggaaaaacctcagcatccagagatacgctgtcatccctttatcgaccaactcgggcctcattggctgggttccccactgtgacacactgcacgccctcatccgggactacagggagaagaagaagatccttctcaacatcgagcatcgcatcatgttgcggatggctccggactatgaccacttgactctgatgcagaaggtggaggtgtttgagcatgccgtcaataatacagctggggacgacctggccaagctgctgtggctgaaaagccccagctccgaggtgtggtttgaccgaagaaccaattatacccgttctttagcggtcatgtcaatggttgggtatattttaggcctgggagatagacacccatccaacctgatgctggaccgtctgagtgggaagatcctgcacattgactttggggactgctttgaggttgctatgacccgagagaagtttccagagaagattccatttagactaacaagaatgttgaccaatgctatggaggttacaggcctggatggcaactacagaatcacatgccacacagtgatggaggtgctgcgagagcacaaggacagtgtcatggccgtgctggaagcctttgtctatgaccccttgctgaactggaggctgatggacacaaataccaaaggcaacaagcgatcccgaacgaggacggattcctactctgctggccagtcagtcgaaattttggacggtgtggaacttggagagccagcccataagaaaacggggaccacagtgccagaatctattcattctttcattggagacggtttggtgaaaccagaggccctaaataagaaagctatccagattattaacagggttcgagataagctcactggtcgggacttctctcatgatgacactttggatgttccaacgcaagttgagctgctcatcaaacaagcgacatcccatgaaaacctctgccagtgctatattggctggtgccctttctggtaactggaggcccagatgtgcccatcacgttttttctgaggcttttgtactttagtaaatgcttccactaaactgaaaccatggtgagaaagtttgactttgttaaatattttgaaatgtaaatgaaaagaactactgtatattaaaagttggtttgaaccaactttctagctgctgttgaagaatatattgtcagaaacacaaggcttgatttggttcccaggacagtgaaacaatagtaataccacgtaaatcaagccattcattttggggaacagaagatccataactttagaaatacgggttttgacttaactcacaagagaactcatcataagtacttgctgatggaagaatgacctagttgctcctctcaacatgggtacagcaaactcagcacagccaagaagcctcaggtcgtggagaacatggattaggatcctagactgtaaagacacagaagatgctgacctcacccctgccacctatcccaagacctcactggtctgtggacagcagcagaaatgtttgcaagataggccaaaatgagtacaaaaggtctgtcttccatcagacccagtgatgctgcgactcacacgcttcaattcaagacctgaccgctagtagggaggtttattcagatcgctggcagcctcggctgagcagatgcacagaggggatcactgtgcagtgggaccaccctcactggccttctgcagcagggttctgggatgttttcagtggtcaaaatactctgtttagagcaagggctcagaaaacagaaatactgtcatggaggtgctgaacacagggaaggtctggtacatattggaaattatgagcagaacaaatactcaactaaatgcacaaagtataaagtgtagccatgtctagacaccatgttgtatcagaataatttttgtgccaataaatgacatcagaattttaaacata

SEQ ID NO: 116 - DNA, 2653 bp, Homo sapiens
ggattccggctcccgcggctgcaggcgcgcggctagagtgcctggcgggctccggcttccgcgtccgccccggccccggtccagacttagtcttcagctccgcgcccgctccgccgcggcccaccgcgcccgccggcagccgagcccccagcgacgcccgcacagctccgggtgcccagacagggggccatgccgtgccggagggaggaggaagaggaagccggcgaggaggcggagggggaggaagaggaggaggacagcttcctcctactgcagcagtcagtggcgctgggcagctcgggcgaggtggaccggctggtggcccagatcggcgagacgctgcagctggacgcggcgcagcacagcccggcctcgccgtgcgggcccccgggggcgccgctgcgggccccggggcccctggctgcggcggtgccggcggacaaggccaggtccccggcggtgccgctgctgctgccgcccgcgttggcggagactgtgggcccggcgccccctggggtcctgcgctgcgccctgggggaccgcggccgcgtgcggggccgcgctgcgccctactgcgtggccgagctcgccacaggccccagcgcgctgtccccactgccccctcaggccgaccttgatgggcctccgggagctggcaagcagggcatcccgcagccgctgtcgggtccgtgccggcgaggatggctccggggcgccgccgcctcccgccgcctgcagcagcgacgcgggtcccaaccagaaacccgcacaggcgacgacgacccgcaccggcttctgcagcagctagtgctctctggaaacctcatcaaggaggccgtgcgaaggcttcattcgcgacggctgcagttacgtgcaaagcttccccaacgcccgctcctgggacctctgtcggccccggtgcatgaacccccttcgcctcgcagccctcgcgcggcctgcagtgaccctggcgcctccgggagggcgcagctcagaactggcgacggcgttcttgtgcctggcagctaacacgcccggggtggccacagcgccagcctcagactggagggcaaggggttcccttgagggctgcagttctactcaggctggtggagaactctggcttttggaagcgagagtaaaaagctaatgacgaggaaccgaaaaatcgcgagtgtttcgcgggtaactggggttgagggccaaaatatttggaatgaaggacttggccctatttaaggcagattttacagagcgcacctcaaacgtacaagtcagtaggactccttatttggcgtgacccgacctggccgcggagcctgcatttcctcgcagcctctcagtgccctccagccccgcgaccatgtggccacaatccacgcttctccggatcgcggtgcgccggaaccacggaggatgatgccagttacttgctttaccttttcagggctggctcctgatccactttgggggaggagaacatgagtagataatttcagggtgcagcccaatctgccagacttaaaaaaaccatcttgtgtctttggaggtgctgcttaataccaaacatgcggtgccatgaagggaccctttgggggttgaataggagttaacccctgcgctctctttgcaactgtctctcttctcagagtggtgggggaaggctgtacgacacgggtggggaaaggaggtgggggcggggagtattgaatggtggtggaagggtagagaggcgcggagtgaaccccacgccctgtctaaagtgtattttcagagccggcccgcctctcctcggttcaaggtcactgtttcctgggcacgcactgggttgcgggacagagtagccaggttctgccggtgctcggagaagagcgcagtgttttgcaagtgctggagtctcctgaggacacgcgcgtcgccgccaccgcgggtgtgggaaagcgcggacgtgctgggcggctgtgcttcggtaggcgaccaccgcccctggccgcgctccgggctttcacggaaactcccgagaccgggccctgggttcctcctctcctactcggctctgcagtcctactcaagcgggtggctctgggatcctgggggcctgggttgggggctagggagacgccatgtgatggacactccagggacacacagcctagcacagcagcttataatgggctctccggggccatttgcaataacagctgcaattccctggatagacgagttgatttcctccctctgcccctcccccagccatgccagctggcctttgtaagtgcaggaaaccgagtagaaaatgtgaccctccaaatggagaagctgcaggctttgccattgtgaaccatggtgaagtgcttggaacatactgttcactcactctaaaggcgctgagactgtgctgttgttctcgtttttatagtcaatggcttgttcatcatccagatgtggctactgacatatctacacttcgcaccggagtgtctggaattgtggctatcctgattataggattttaacttaactgaaatgcctgctttgaataaatgtgttgggttttttgtttggttttattttatacttgccatcagtgaaaaagatgtacagaacacatttctctgatctccataaacatgaaaacacttgaaatctcaaa

SEQ ID NO: 117 - DNA, 2222 bp, Homo sapiens
ggctcgagtgcctggcgggctccggcttccgcgtccgcccctgctccggcttcgcccgcagctccgcgcccgcgggcaaccaagcccccagcgaagcccgcacagctccgggtgccaggacggggggccatgccgtgccggagggaggaggaagaggaagccggcgaggaggcggagggggaggaagaggaggacgacagcttcctcctgctgcagcagtcggtgacgctgggcagctcgggcgaggtggaccggctggtggcccagatcggcgagacgctgcagctggacgcggcgcaggacagcccggcctcgccgtgcgcgcccccgggggtgccgctgcgggccccggggcccctggctgcggcggtgccggcggacaaggcccggcccccggcggtgccgctgctgctgccgcccgcttcggctgagacggtgggcccggcgccctctggggccctgcgctgcgccctaggggaccgcggccgcgtgcgcggacgcgctgcgccctactgcgtggcggaggtcgccgcaggccccagcgcgctgccggggccgtgccggcgaggatggctcagggacgcggtcacctcccgccgcttgcagcagcgccgatggacccaagccggggcacgcgccggcgacgacgacccgcatcggctcctccagcagctcgtgctctcgggaaacctcatcaaggaagccgtgcggagactccaacgagccgtcgccgcggttgcagccacgggccccgcaagcgcccctgggcccgggggaggccgcagcggacctgaccgcattgccctgcagccctcaggctccttgctctgacgcaggcctcctggaggaggaagtggaggccgctgcgtagacccaacagcgtccagttcctactaactctgagctgaagccgacgtcgccagcctgggagcgaccactttggctgcggggaggcgcgtggggagagatctcaaccagagaagttaccagccgcggcgaggccgtcggagaaaacttaagcgtggagaaatgtatgcgccagggtgcttccgtggggcatgagaatttcccgggccatccaagcccaaggacctgggataaactgggagaactatggcagctacttgcatcgacttgtacctcacttagcccttgggggcgtcgtgagcttggattgtttaaggagggctcaggggtaggaatcgcgatggctttataacaatacttgaaaactaacgacacgcatacattttcttattttctggtggaggagcttagtaagtggtgctacaattgctgtgcaaagaaattccagaggggagaagaatgtaaaagtttggtggtgggtggcttggcattgcccctttttcccaccgattcggtggctggtgaaggtgggagatgtgaactccaattaagggactggagagaggtgaagaattttgcaggtgggagatttggatttgaatgtggacttgtaaatgacttgaccttgccatctgtgttcaaggtcacggtttgctgtggggttcctgggagagcttactcaccccggagtcttttctttctcttgctccaagaagagccctgttggtgctttaccaccgcttggagtctcccgaggacacaaacaggcagagagggacgtgtagggagagttctttcctgttttctgtgctttcctttttacaggactcccggaaggccactcatggccatgccaggagctttctcagaaacagtcataaacgatctcttgagtctctttcttgtcctcccagctgagctttcttattccaccctttctggtgtctataggaatgcatgagagaccctggacgtttttctgctctcttctggccctccatggagtcatgggcctcggcctcggcggctcctcaccctcacaatttatttcctcctcccgtgccagcccttcttttgtgtctgaaaccggttttaaaatgtgactctcccagagaagaagccgctggctgtatgaaacttgacggcgcttttgtaaggtgccacccccaaactttaaggtagctaaaccaatttttaaaagattcaatggcttgttcatcctccagatgtagctattgatgtacacttcgcaacggagtgtctgaaattgtggtggtcctgatttataggatttcataattaaaatgtctgctgaataaatttggcttttgttttggaaaaaaaaaaaaaaaaaa

SEQ ID NO: 118 - DNA, 2058 bp, Homo sapiens
gttgggaaagagcagcctgggcggcaggggcggtggctggagctcggtaaagctcgtgggaccccattgggggaatttgatccaaggaagcggtgattgccgggggaggagaagctcccagatccttgtgtccacttgcagcgggggaggcggagacggcggagcgggccttttggcgtccactgcgcggctgcaccctgccccatcctgccgggatcatggtctgcggcagcccgggagggatgctgctgctgcgggccgggctgcttgccctggctgctctctgcctgctccgggtgcccggggctcgggctgcagcctgtgagcccgtccgcatccccctgtgcaagtccctgccctggaacatgactaagatgcccaaccacctgcaccacagcactcaggccaacgccatcctggccatcgagcagttcgaaggtctgctgggcacccactgcagccccgatctgctcttcttcctctgtgccatgtacgcgcccatctgcaccattgacttccagcacgagcccatcaagccctgtaagtctgtgtgcgagcgggcccggcagggctgtgagcccatactcatcaagtaccgccactcgtggccggagaacctggcctgcgaggagctgccagtgtacgacaggggcgtgtgcatctctcccgaggccatcgttactgcggacggagctgattttcctatggattctagtaacggaaactgtagaggggcaagcagtgaacgctgtaaatgtaagcctattagagctacacagaagacctatttccggaacaattacaactatgtcattcgggctaaagttaaagagataaagactaagtgccatgatgtgactgcagtagtggaggtgaaggagattctaaagtcctctctggtaaacattccacgggacactgtcaacctctataccagctctggctgcctctgccctccacttaatgttaatgaggaatatatcatcatgggctatgaagatgaggaacgttccagattactcttggtggaaggctctatagctgagaagtggaaggatcgactcggtaaaaaagttaagcgctgggatatgaagcttcgtcatcttggactcagtaaaagtgattctagcaatagtgattccactcagagtcagaagtctggcaggaactcgaacccccggcaagcacgcaactaaatcccgaaatacaaaaagtaacacagtggacttcctattaagacttacttgcattgctggactagcaaaggaaaattgcactattgcacatcatattctattgtttactataaaaatcatgtgataactgattattacttctgtttctcttttggtttctgcttctctcttctctcaacccctttgtaatggtttgggggcagactcttaagtatattgtgagttttctatttcactaatcatgagaaaaactgttcttttgcaataataataaattaaacatgctgttaccagagcctctttgctggagtctccagatgttaatttactttctgcaccccaattgggaatgcaatattggatgaaaagagaggtttctggtattcacagaaagctagatatgccttaaaacatactctgccgatctaattacagccttatttttgtatgccttttgggcattctcctcatgcttagaaagttccaaatgtttataaaggtaaaatggcagtttgaagtcaaatgtcacataggcaaagcaatcaagcaccaggaagtgtttatgaggaaacaacacccaagatgaattatttttgagactgtcaggaagtaaaataaataggagcttaagaaagaacattttgcctgattgagaagcacaactgaaaccagtagccgctggggtgttaatggtagcattcttcttttggcaatacatttgatttgttcatgaatatattaatcagcattagagaaatgaattataactagacatctgctgttatcaccatagttttgtttaatttgcttccttttaaataaacccattggtgaaagtcccaaaaaaaaaaaaaaaaaaaaa

SEQ ID NO: 119 - DNA, 1906 bp, Homo sapiens
acagctcttgccaggcaaggcagccgaccacagaccaggatgaagacactccagtttttcttccttttctgttgctggaaagcaatctgctgcaatagctgtgagctgaccaacatcaccattgcaatagagaaagaagaatgtcgtttctgcataagcatcaacaccacttggtgtgctggctactgctacaccagggatctggtgtataaggacccagccaggcccaaaatccagaaaacatgtaccttcaaggaactggtatacgaaacagtgagagtgcccggctgtgctcaccatgcagattccttgtatacatacccagtggccacccagtgtcactgtggcaagtgtgacagcgacagcactgattgtactgtgcgaggcctggggcccagctactgctcctttggtgaaatgaaagaataaagatcagtggacatttcaggccacatacccttgtcctgaaggaccaagatattcaaaaagtctgtgtgtgtgcaatgtgcccaggggacaaaccactggatcaggggattcagactctactgatccctggtctactggcagagggaactctgggaattgagagtgctgggggccaggactccatcatgattcagctctatattcctaggtctgatttcataaggtttattcagtcttaactcacagacttgtgcctggtttcttctttaaaaatcttagaaatcttctcaggcaatgcctctctcttagggggaaacataagcctagaaggaggaagcagtaatgggagtgagtgaaagaactaactgcagcagtcttctggtagactcttgggccctctagagcaaggtcagcatcttcagcattgtagcgtcaatgcctagcactctgcctggaacttagaaacacaacaatgacttctttagatcagaaaggtcaagggtagaaaatactggaagacgatgtttgaggtaagctgatgaggctgcccgcagccacaccagtcccatgaaagttagtggcatcagttccacctcgccttttctccagcacatggagtattgagacatgatgtatctttctgaattgtttggtacagatggggagtaacagagctcaagatttccaagctattactaccaagcctgttagttaagggcaaaggcaagaaattgtaatttggggctgtggaaattagcctgcctctattcattacttaaacaaattgatcacatgctactaggctcctgcaaaactcctttttgagataaagggaaaaaaccaaactatctcaccctaccctccctaggatccacttctttggaatgacaaaggatttgaaagtaggtttgaaagcagtttcagcaatttaataaatataattaatttgtctacaaatatatttgtataaataaatagctcctttagaaagaattagccatgggggacgaggggaaactgctgttttctaggatcctgtctacatcaatcttctattttatccatccatgttctcccaaatctgtgctttctttcaacaggttatatattaaaactatttcatgagttgatttcttttaaacgtgttaactgtcttagttatgcactcagtttcacactcatattgtttaactaatttatttaaatcttatttttttaataaagatgctagccaccagagtcacaggcttggattgttttatgtacaaacagatgacttagatattctgtattttataatattagtggaatgaaatcttaaaatataattcccagtgtttctataaatattacctttccttatctttggagatattaaaaataattttgttggatttctgaagtgttttgtcacttaaatttcctgtcattttttgaagacattttctgatgtaatttgggagaaaaaaagcataga

SEQ ID NO: 120 - DNA, 4350 bp, Homo sapiens
agttgagggattgacacaaatggtcaggcggcggcggcggagaaggaggcggaggcgcaggggggagccgagcccgctgggctgcggagagttgcgctctctacggggccgcggccactagcgcggcgccgccagccgggagccagcgagccgagggccaggaaggcgggacacgaccccggcgcgccctagccacccgggttctccccgccgcccgcgcttcatgaatcgcaagtttccgcggcggcggcggctgcggtacgcagaacaggagccgggggagcgggccgaaagcggcttgggctcgacggagggcacccgcgcagaggtctccctggccgcagggggagccgccgccggccgtgcccctggcagccccagcggagcggcgccaagagaggagccgagaaagtatggctgaggaggaggcgcctaagaagtcccgggccgccggcggtggcgcgagctgggaactttgtgccggggcgctctcggcccggctggcggaggagggcagcggggacgccggtggccgccgccgcccgccagttgacccccggcgattggcgcgccagctgctgctgctgctttggctgctggaggctccgctgctgctgggggtccgggcccaggcggcgggccaggggccaggccaggggcccgggccggggcagcaaccgccgccgccgcctcagcagcaacagagcgggcagcagtacaacggcgagcggggcatctccgtcccggaccacggctattgccagcccatctccatcccgctgtgcacggacatcgcgtacaaccagaccatcatgcccaacctgctgggccacacgaaccaggaggacgcgggcctggaggtgcaccagttctaccctctagtgaaagtgcagtgttccgctgagctcaagttcttcctgtgctccatgtacgcgcccgtgtgcaccgtgctagagcaggcgctgccgccctgccgctccctgtgcgagcgcgcgcgccagggctgcgaggcgctcatgaacaagttcggcttccagtggccagacacgctcaagtgtgagaagttcccggtgcacggcgccggcgagctgtgcgtgggccagaacacgtccgacaagggcaccccgacgccctcgctgcttccagagttctggaccagcaaccctcagcacggcggcggagggcaccgtggcggcttcccggggggcgccggcgcgtcggagcgaggcaagttctcctgcccgcgcgccctcaaggtgccctcctacctcaactaccacttcctgggggagaaggactgcggcgcaccttgtgagccgaccaaggtgtatgggctcatgtacttcgggcccgaggagctgcgcttctcgcgcacctggattggcatttggtcagtgctgtgctgcgcctccacgctcttcacggtgcttacgtacctggtggacatgcggcgcttcagctacccggagcggcccatcatcttcttgtccggctgttacacggccgtggccgtggcctacatcgccggcttcctcctggaagaccgagtggtgtgtaatgacaagttcgccgaggacggggcacgcactgtggcgcagggcaccaagaaggagggctgcaccatcctcttcatgatgctctacttcttcagcatggccagctccatctggtgggtgatcctgtcgctcacctggttcctggcggctggcatgaagtggggccacgaggccatcgaagccaactcacagtattttcacctggccgcctgggctgtgccggccatcaagaccatcaccatcctggcgctgggccaggtggacggcgatgtgctgagcggagtgtgcttcgtggggcttaacaacgtggacgcgctgcgtggcttcgtgctggcgcccctcttcgtgtacctgtttatcggcacgtcctttctgctggccggctttgtgtcgctcttccgcatccgcaccatcatgaagcacgatggcaccaagaccgagaagctggagaagctcatggtgcgcattggcgtcttcagcgtgctgtacactgtgccagccaccatcgtcatcgcctgctacttctacgagcaggccttccgggaccagtgggaacgcagctgggtggcccagagctgcaagagctacgctatcccctgccctcacctccaggcgggcggaggcgccccgccgcacccgcccatgagcccggacttcacggtcttcatgattaagtaccttatgacgctgatcgtgggcatcacgtcgggcttctggatctggtccggcaagaccctcaactcctggaggaagttctacacgaggctcaccaacagcaaacaaggggagactacagtctgagacccggggctcagcccatgcccaggcctcggccggggcgcagcgatcccccaaagccagcgccgtggagttcgtgccaatcctgacatctcgaggtttcctcactagacaactctctttcgcaggctcctttgaacaactcagctcctgcaaaagcttccgtccctgaggcaaaaggacacgagggcccgactgccagagggaggatggacagacctcttgccctcacactctggtaccaggactgttcgcttttatgattgtaaatagcctgtgtaagatttttgtaagtatatttgtatttaaatgacgaccgatcacgcgtttttctttttcaaaagtttttaattatttagggcggtttaaccatttgaggcttttccttcttgcccttttcggagtattgcaaaggagctaaaactggtgtgcaaccgcacagcgctcctggtcgtcctcgcgcgcctctccctaccacgggtgctcgggacggctgggcgccagctccggggcgagttcagcactgcggggtgcgactagggctgcgctgccagggtcacttcccgcctcctccttttgccccctccccctccttctgtcccctccctttctttcctggcttgaggtaggggctcttaaggtacagaactccacaaaccttccaaatctggaggagggcccccatacattacaattcctcccttgctcggcggtggattgcgaaggcccgtcccttcgacttcctgaagctggatttttaactgtccagaactttcctccaacttcatgggggcccacgggtgtgggcgctggcagtctcagcctccctccacggtcaccttcaacgcccagacactcccttctcccaccttagttggttacagggtgagtgagataaccaatgccaaactttttgaagtctaatttttgaggggtgagctcatttcattctctagtgtctaaaacctggtatgggtttggccagcgtcatggaaagatgtggttactgagatttgggaagaagcatgaagctttgtgtgggttggaagagactgaagatatgggttataaaatgttaattctaattgcatacggatgcctggcaaccttgcctttgagaatgagacagcctgcgcttagattttaccggtctgtaaaatggaaatgttgaggtcacctggaaagctttgttaaggagttgatgtttgctttccttaacaagacagcaaaacgtaaacagaaattgaaaacttgaaggatatttcagtgtcatggacttcctcaaaatgaagtgctattttcttatttttaatcaaataactagacatatatcagaaactttaaaatgtaaaagttgtacactttcaacattttattacgattattattcagcagcacattctgaggggggaacaattcacaccaccaataataacctggtaagatttcaggaggtaaagaaggtggaataattgacggggagatagcgcctgaaataaacaaaatatgggcatgcatgctaaagggaaaatgtgtgcaggtctactgcattaaatcctgtgtgctcctcttttggatttacagaaatgtgtcaaatgtaaatctttcaaagccatttaaaaatattcactttagttctctgtgaagaagaggagaaaagcaatcctcctgattgtattgttttaaactttaagaatttatcaaaatgccggtacttaggacctaaatttatctatgtctgtcatacgctaaaatgatattggtctttgaatttggtatacatttattctgttcactatcacaaaatcatctatatttatagaggaatagaagtttatatatatataataccatatttttaatttcacaaataaaaaattcaaagttttgtacaaaattatatggattttgtgcctgaaaataatagagcttgagctgtctgaactattttacattttatggtgtctcatagccaatcccacagtgtaaaaattca

SEQ ID NO: 121 - DNA, 3260 bp, Homo sapiens
tcgaaacagctgccggctggtcccggccgaggccggcgcagggagggaggagccgcccgggctgtgggggcgccgcgagctgggccggcctcggtgtgcccgcgccgccagcccgctccagacgcgccacctgggcgctccaagaagaggccgaagtttgccgcggccgtgagttggagctcgcgccgggccgctgcgccgggagctccgggggcttccctcgcttcccggtattgtttgcaaactttgctgctctccgccgcggcccccaactcggcggacgccgggcgcggagagccgagccgggggcgctgtgcgcagcgctcgggccaggccgggcgggcatgggcgggggcccgagcaggggtggagagccggggccagcagcagcccgtgcccgggagcggcggcgctgaggggcgcggagctccccgcgaggacacgtccaacgccagcatgcagcgcccgggcccccgcctgtggctggtcctgcaggtgatgggctcgtgcgccgccatcagctccatggacatggagcgcccgggcgacggcaaatgccagcccatcgagatcccgatgtgcaaggacatcggctacaacatgactcgtatgcccaacctgatgggccacgagaaccagcgcgaggcagccatccagttgcacgagttcgcgccgctggtggagtacggctgccacggccacctccgcttcttcctgtgctcgctgtacgcgccgatgtgcaccgagcaggtctctacccccatccccgcctgccgggtcatgtgcgagcaggcccggctcaagtgctccccgattatggagcagttcaacttcaagtggcccgactccctggactgccggaaactccccaacaagaacgaccccaactacctgtgcatggaggcgcccaacaacggctcggacgagcccacccggggctcgggcctgttcccgccgctgttccggccgcagcggccccacagcgcgcaggagcacccgctgaaggacgggggccccgggcgcggcggctgcgacaacccgggcaagttccaccacgtggagaagagcgcgtcgtgcgcgccgctctgcacgcccggcgtggacgtgtactggagccgcgaggacaagcgcttcgcagtggtctggctggccatctgggcggtgctgtgcttcttctccagcgccttcaccgtgctcaccttcctcatcgacccggcccgcttccgctaccccgagcgccccatcatcttcctctccatgtgctactgcgtctactccgtgggctacctcatccgcctcttcgccggcgccgagagcatcgcctgcgaccgggacagcggccagctctatgtcatccaggagggactggagagcaccggctgcacgctggtcttcctggtcctctactacttcggcatggccagctcgctgtggtgggtggtcctcacgctcacctggttcctggccgccggcaagaagtggggccacgaggccatcgaagccaacagcagctacttccacctggcagcctgggccatcccggcggtgaagaccatcctgatcctggtcatgcgcagggtggcgggggacgagctcaccggggtctgctacgtgggcagcatggacgtcaacgcgctcaccggcttcgtgctcattcccctggcctgctacctggtcatcggcacgtccttcatcctctcgggcttcgtggccctgttccacatccggagggtgatgaagacgggcggcgagaacacggacaagctggagaagctcatggtgcgtatcgggctcttctctgtgctgtacaccgtgccggccacctgtgtgatcgcctgctacttttacgaacgcctcaacatggattactggaagatcctggcggcgcagcacaagtgcaaaatgaacaaccagactaaaacgctggactgcctgatggccgcctccatccccgccgtggagatcttcatggtgaagatctttatgctgctggtggtggggatcaccagcgggatgtggatttggacctccaagactctgcagtcctggcagcaggtgtgcagccgtaggttaaagaagaagagccggagaaaaccggccagcgtgatcaccagcggtgggatttacaaaaaagcccagcatccccagaaaactcaccacgggaaatatgagatccctgcccagtcgcccacctgcgtgtgaacagggctggagggaagggcacaggggcgcccggagctaagatgtggtgcttttcttggttgtgtttttctttcttcttcttctttttttttttttataaaagcaaaagagaaatacataaaaaagtgtttaccctgaaattcaggatgctgtgatacactgaaaggaaaaatgtacttaaagggttttgttttgttttggttttccagcgaagggaagctcctccagtgaagtagcctcttgtgtaactaatttgtggtaaagtagttgattcagccctcagaagaaaacttttgtttagagccctccctaaatatacatctgtgtatttgagttggctttgctacccatttacaaataagaggacagataactgctttgcaaattcaagagcctcccctgggttaacaaatgagccatccccagggcccacccccaggaaggccacagtgctgggcggcatccctgcagaggaaagacaggacccggggcccgcctcacaccccagtggatttggagttgcttaaaatagactccggccttcaccaatagtctctctgcaagacagaaacctccatcaaacctcacatttgtgaactcaaacgatgtgcaatacatttttttctctttccttgaaaataaaaagagaaacaagtattttgctatatataaagacaacaaaagaaatctcctaacaaaagaactaagaggcccagccctcagaaacccttcagtgctacattttgtggctttttaatggaaaccaagccaatgttatagacgtttggactgatttgtggaaaggaggggggaagagggagaaggatcattcaaaagttacccaaagggcttattgactctttctattgttaaacaaatgatttccacaaacagatcaggaagcactaggttggcagagacactttgtctagtgtattctcttcacagtgccaggaaagagtggtttctgcgtgtgtatatttgtaatatatgatatttttcatgctccactattttattaaaaataaaatatgttctttagtttgctgctaaaaaaa

SEQ ID NO: 122 - DNA, 1983 bp, Homo sapiens
cgagtaaagtttgcaaagaggcgcgggaggcggcagccgcagcgaggaggcggcggggaagaagcgcagtctccgggttgggggcgggggcggggggggcgccaaggagccgggtggggggcggcggccagcatgcggccccgcagcgccctgccccgcctgctgctgccgctgctgctgctgcccgccgccgggccggcccagttccacggggagaagggcatctccatcccggaccacggcttctgccagcccatctccatcccgctgtgcacggacatcgcctacaaccagaccatcatgcccaaccttctgggccacacgaaccaggaggacgcaggcctagaggtgcaccagttctatccgctggtgaaggtgcagtgctcgcccgaactgcgcttcttcctgtgctccatgtacgcacccgtgtgcaccgtgctggaacaggccatcccgccgtgccgctctatctgtgagcgcgcgcgccagggctgcgaagccctcatgaacaagttcggttttcagtggcccgagcgcctgcgctgcgagcacttcccgcgccacggcgccgagcagatctgcgtcggccagaaccactccgaggacggagctcccgcgctactcaccaccgcgccgccgccgggactgcagccgggtgccgggggcaccccgggtggcccgggcggcggcggcgctcccccgcgctacgccacgctggagcaccccttccactgcccgcgcgtcctcaaggtgccatcctatctcagctacaagtttctgggcgagcgtgattgtgctgcgccctgcgaacctgcgcggcccgatggttccatgttcttctcacaggaggagacgcgtttcgcgcgcctctggatcctcacctggtcggtgctgtgctgcgcttccaccttcttcactgtcaccacgtacttggtagacatgcagcgcttccgctacccagagcggcctatcatttttctgtcgggctgctacaccatggtgtcggtggcctacatcgcgggcttcgtgctccaggagcgcgtggtgtgcaacgagcgcttctccgaggacggttaccgcacggtggtgcagggcaccaagaaggagggctgcaccatcctcttcatgatgctctacttcttcagcatggccagctccatctggtgggtcatcctgtcgctcacctggttcctggcagccggcatgaagtggggccacgaggccatcgaggccaactctcagtacttccacctggccgcctgggccgtgccggccgtcaagaccatcaccatcctggccatgggccagatcgacggcgacctgctgagcggcgtgtgcttcgtaggcctcaacagcctggacccgctgcggggcttcgtgctagcgccgctcttcgtgtacctgttcatcggcacgtccttcctcctggccggcttcgtgtcgctcttccgcatccgcaccatcatgaagcacgacggcaccaagaccgaaaagctggagcggctcatggtgcgcatcggcgtcttctccgtgctctacacagtgcccgccaccatcgtcatcgcttgctacttctacgagcaggccttccgcgagcactgggagcgctcgtgggtgagccagcactgcaagagcctggccatcccgtgcccggcgcactacacgccgcgcatgtcgcccgacttcacggtctacatgatcaaatacctcatgacgctcatcgtgggcatcacgtcgggcttctggatctggtcgggcaagacgctgcactcgtggaggaagttctacactcgcctcaccaacagccgacacggtgagaccaccgtgtgagggacgcccccaggccggaaccgcgcggcgctttcctccgcccggggtggggcccctacagactccgtattttatttttttaaataaaaaacgatcgaaaccatttcacttttaggttgctttttaaaagagaactctctgcccaacaccccc

SEQ ID NO: 123 - DNA, 3933 bp, Homo sapiens
gccgctccgggtacctgagggacgcgcggccgcccgcggcaggcggtgcagcccccccaccccttggagccaggcgccggggtctgaggatagcatttctcaagacctgacttatggagcacttgtaacctgagatatttcagttgaaggaagaaatagctcttctcctaagatggaatctgtggtttgggaatgtggttgatcaacttgatatgttggccaaatgtgccccatgtaataaaatgaaaagaagagacaagatgatgtcattttcccatattgtgaaaccaaaaacaaacgccttttgtgagaccaagctaacaaacctctgacggtgcgaagagtatttaactgtttgaagaatttaacagtaagatacagaagaagtaccttcgagctgagacctgcaggtgtataaatatctaaaatacatattgaataggcctgatcatctgaatctccttcagacccaggaaggatggctatgacttggattgtcttctctctttggcccttgactgtgttcatggggcatataggtgggcacagtttgttttcttgtgaacctattaccttgaggatgtgccaagatttgccttataatactaccttcatgcctaatcttctgaatcattatgaccaacagacagcagctttggcaatggagccattccaccctatggtgaatctggattgttctcgggatttccggccttttctttgtgcactctacgctcctatttgtatggaatatggacgtgtcacacttccctgtcgtaggctgtgtcagcgggcttacagtgagtgttcgaagctcatggagatgtttggtgttccttggcctgaagatatggaatgcagtaggttcccagattgtgatgagccatatcctcgacttgtggatctgaatttagctggagaaccaactgaaggagccccagtggcagtgcagagagactatggtttttggtgtccccgagagttaaaaattgatcctgatctgggttattcttttctgcatgtgcgtgattgttcacctccttgtccaaatatgtacttcagaagagaagaactgtcatttgctcgctatttcataggattgatttcaatcatttgcctctcggccacattgtttacttttttaacttttttgattgatgtcacaagattccgttatcctgaaaggcctattatattttatgcagtctgctacatgatggtatccttaattttcttcattggatttttgcttgaagatcgagtagcctgcaatgcatccatccctgcacaatataaggcttccacagtgacacaaggatctcataataaagcctgtaccatgctttttatgatactctatttttttactatggctggcagtgtatggtgggtaattcttaccatcacatggtttttagcagctgtgccaaagtggggtagtgaagctattgagaagaaagcattgctgtttcacgccagtgcatggggcatccccggaactctaaccatcatccttttagcgatgaataaaattgaaggtgacaatattagtggcgtgtgttttgttggcctctacgatgttgatgcattgagatattttgttcttgctcccctctgcctgtatgtggtagttggggtttctctcctcttagctggcattatatccctaaacagagttcgaattgagattccattagaaaaggagaaccaagataaattagtgaagtttatgatccggatcggtgttttcagcattctttatctcgtaccactcttggttgtaattggatgctacttttatgagcaagcttaccggggcatctgggaaacaacgtggatacaagaacgctgcagagaatatcacattccatgtccatatcaggttactcaaatgagtcgtccagacttgattctctttctgatgaaatacctgatggctctcatagttggcattccctctgtattttgggttggaagcaaaaagacatgctttgaatgggccagtttttttcatggtcgtaggaaaaaagagatagtgaatgagagccgacaggtactccaggaacctgattttgctcagtctctcctgagggatccaaatactcctatcataagaaagtcaaggggaacttccactcaaggaacatccacccatgcttcttcaactcagctggctatggtggatgatcaaagaagcaaagcaggaagcatccacagcaaagtgagcagctaccacggcagcctccacagatcacgtgatggcaggtacacgccctgcagttacagaggaatggaggagagactacctcatggcagcatgtcacgactaacagatcactccaggcatagtagttctcatcggctcaatgaacagtcacgacatagcagcatcagagatctcagtaataatcccatgactcatatcacacatggcaccagcatgaatcgggttattgaagaagatggaaccagtgcttaatttgtcttgtctaaggtggaaatcttgtgctgtttaaaaagcagattttattctttgccttttgcatgactgatagctgtaactcacagttaacatgctttcagtcaagtacagattgtgtccactggaaaggtaaatgattgcttttttatattgcatcaaacttggaacatcaaggcatccaaaacactaagaattctatcatcacaaaaataattcgtctttctaggttatgaagagataattatttgtctggtaagcatttttataaacccactcattttatatttagaaaaatcctaaatgtgtggtgactgctttgtagtgaactttcatatactataaactagttgtgagataacattctggtagctcagttaataaaacaatttcagaattaaagaaattttctatgcaaggtttacttctcagatgaacagtaggactttgtagttttatttccactaagtgaaaaaagaactgtgtttttaaactgtaggagaatttaataaatcagcaagggtattttagctaatagaataaaagtgcaacagaagaatttgattagtctatgaaaggttctcttaaaattctatcgaaataatcttcatgcagagatattcagggtttggattagcagtggaataaagagatgggcattgtttcccctataattgtgctgtttttataacttttgtaaatattactttttctggctgtgtttttataacttatccatatgcatgatggaaaaattttaatttgtagccatcttttcccatgtaatagtattgattcatagagaacttaatgttcaaaatttgctttgtggaggcatgtaataagataaacatcatacattataaggtaaccacaattacaaaatggcaaaacattttctctgtattcattgttgtatttttctacagtgagatgtgatcttgccaaagccaccagaccttggcttccaggccctcctgtagtgagttgattgtctgcacttgccttgcccaatagccagtaggctacagcttttgccccacacccttattttcagattctggatcattcttgtttacaactgaaatatatataacctcagtccaaagtggtgattgatttgagtatttgaaaattgttgtagctaaatgaagcatgattagtcttagtatgaatatcatttaatctttaaaaaatcaagtaaaaatgtttatctgataatgtttaaataatttacaatataaactgtaaaacttattaggcatgaaatcaatcagaagagaaagaaaaatgctggaacatgcttgatgtattatgtaaaaagcatatttaaacaagggtcctcaaccctgactgcagataagaatcacttgggttacttcagatgcctaacaccttcctctcatacaaataagaattggtagctttcttaaaaaaaaaaaaaaaaaaaaaaa

SEQ ID NO: 124 - DNA, 7391 bp, Homo sapiens
gctgcgcagcgctggctgctggctggcctcgcggagacgccgaacggacgcggccggcgccggcttgtgggctcgccgcctgcagccatgaccctcgcagcctgtccctcggcctcggcccgggacgtctaaaatcccacacagtcgcgcgcagctgctggagagccggccgctgccccctcgtcgccgcatcacactcccgtcccgggagctgggagcagcgcgggcagccggcgcccccgtgcaaactgggggtgtctgccagagcagccccagccgctgccgctgctacccccgatgctggccatggcctggcggggcgcagggccgagcgtcccgggggcgcccgggggcgtcggtctcagtctggggttgctcctgcagttgctgctgctcctggggccggcgcggggcttcggggacgaggaagagcggcgctgcgaccccatccgcatctccatgtgccagaacctcggctacaacgtgaccaagatgcccaacctggttgggcacgagctgcagacggacgccgagctgcagctgacaactttcacaccgctcatccagtacggctgctccagccagctgcagttcttcctttgttctgtttatgtgccaatgtgcacagagaagatcaacatccccattggcccatgcggcggcatgtgtctttcagtcaagagacgctgtgaacccgtcctgaaggaatttggatttgcctggccagagagtctgaactgcagcaaattcccaccacagaacgaccacaaccacatgtgcatggaagggccaggtgatgaagaggtgcccttacctcacaaaacccccatccagcctggggaagagtgtcactctgtgggaaccaattctgatcagtacatctgggtgaaaaggagcctgaactgtgtgctcaagtgtggctatgatgctggcttatacagccgctcagccaaggagttcactgatatctggatggctgtgtgggccagcctgtgtttcatctccactgccttcacagtactgaccttcctgatcgattcttctaggttttcctaccctgagcgccccatcatatttctcagtatgtgctataatatttatagcattgcttatattgtcaggctgactgtaggccgggaaaggatatcctgtgattttgaagaggcagcagaacctgttctcatccaagaaggacttaagaacacaggatgtgcaataattttcttgctgatgtacttttttggaatggccagctccatttggtgggttattctgacactcacttggtttttggcagcaggactcaaatggggtcatgaagccattgaaatgcacagctcttatttccacattgcagcctgggccatccccgcagtgaaaaccattgtcatcttgattatgagactggtggatgcagatgaactgactggcttgtgctatgttggaaaccaaaatctcgatgccctcaccgggttcgtggtggctcccctctttacttatttggtcattggaactttgttcattgctgcaggtttggtggccttgttcaaaattcggtcaaatcttcaaaaggatgggacaaagacagacaagttagaaagactgatggtcaagattggggtgttctcagtactgtacacagttcctgcaacgtgtgtgattgcctgttatttttatgaaatctccaactgggcactttttcggtattctgcagatgattccaacatggctgttgaaatgttgaaaatttttatgtctttgttggtgggcatcacttcaggcatgtggatttggtctgccaaaactcttcacacgtggcagaagtgttccaacagattggtgaattctggaaaggtaaagagagagaagagaggaaatggttgggtgaagcctggaaaaggcagtgagactgtggtataaggctagtcagcctccatgctttcttcattttgaaggggggaatgccagcattttggaggaaattctactaaaagttttatgcagtgaatctcagtttgaacaaactagcaacaattaagtgacccccgtcaacccactgcctcccaccccgaccccagcatcaaaaaaccaatgattttgctgcagactttggaatgatccaaaatggaaaagccagttagaggctttcaaagctgtgaaaaatcaaaacgttgatcactttagcaggttgcagcttggagcgtggaggtcctgcctagattccaggaagtccagggcgatactgttttcccctgcagggtgggatttgagctgtgagttggtaactagcagggagaaatattaacttttttaaccctttaccattttaaatactaactgggtctttcagatagcaaagcaatctataaacactggaaacgctgggttcagaaaagtgttacaagagttttatagtttggctgatgtaacataaacatcttctgtggtgcgctgtctgctgtttagaactttgtggactgcactcccaagaagtggtgttagaatctttcagtgcctttgtcataaaacagttatttgaacaaacaaaagtactgtactcacacacataaggtatccagtggatttttcttctctgtcttcctctcttaaatttcaacatctctcttcttggctgctgctgttttcttcattttatgttaatgactcaaaaaaggtatttttatagaatttttgtactgcagcatgcttaaagaggggaaaaggaagggtgattcactttctgacaatcacttaattcagaggaaaatgagatttactaagttgacttacctgacggaccccagagacctattgcattgagcagtggggacttaatatattttacttgtgtgattgcatctatgcagacgccagtctggaagagctgaaatgttaagtttcttggcaactttgcattcacacagattagctgtgtaatttttgtgtgtcaattacaattaaaagcacattgttggaccatgacatagtatactcaactgactttaaaactatggtcaacttcaacttgcattctcagaatgatagtgcctttaaaaatttttttattttttaaagcataagaatgttatcagaatctggtctacttaggacaatggagactttttcagttttataaagggaactgaggacagctaatccaactacttggtgcgtaattgtttcctagtaattggcaaaggctccttgtaagatttcactggaggcagtgtggcctggagtatttatatggtgcttaatgaatctccagaatgccagccagaagcctgattggttagtagggaataaagtgtagaccatatgaaatgaactgcaaactctaatagcccaggtcttaattgcctttagcagaggtatccaaagcttttaaaatttatgcatacgttcttcacaagggggtacccccagcagcctctcgaaaattgcacttctcttaaaactgtaactggcctttctcttaccttgccttaggccttctaatcatgagatcttggggacaaattgactatgtcacaggttgctctccttgtaactcatacctgtctgcttcagcaactgctttgcaatgacatttatttattaattcatgccttaaaaaaataggaagggaagcttttttttttctttttttttttttcaatcacactttgtggaaaaacatttccagggactcaaaattccaaaaaggtggtcaaattctggaagtaagcatttcctcttttttaaaaatttggtttgagccttatgcccatagtttgacatttccctttcttctttcctttttgtttttgtgtggttcttgagctctctgacatcaagatgcatgtaaagtcgattgtatgttttggaaggcaaagtcttggcttttgagactgaagttaagtgggcacaggtggcccctgctgctgtgcccagtctgagtaccttggctagactctaggtcaggctccaggagcatgagaattgatccccagaagaaccattttaactccatctgatactccattgcctatgaaatgtaaaatgtgaactccctgtgctgcttgtagacagttcccataactgtccacggccctggagcacgcacccaggggcagagcctgcccttactcacgctctgctctggtgtcttgggagttgtgcagggactctggcccaggcaggggaaggaagaccaggcggtaggggactggtcttgctgttagagtatagaggtttgtaatgcagttttcttcataatgtgtcagtgattgtgtgaccaaggcagcatctagcagaaagccaggcatggagtaggtgatcgatacttgtcaatgactaaataataacaataaaagagcacttgggtgaatctgggcacctgatttctgagttttgagttctggagctagtgttttgacaatgctttgggttttgacatgccttttccacaaatctcttgccttttcagggcaaagtgtatttgatcagaagtggccatttggattagtagccttagcaatgctacagggttataggcctctcctttcacattccagacaatggagagtgtttatggtttcaggaaaagaactttgtggctgaggggtcagttaccagtgaccttcaatcaactccatcacttcttaaatcggtatttgttaaaaaaatcagttattttatttattgagtgccgactgtagtaaagccctgaaatagataatctctgttcttctaactgatctaggatggggacgcacccaggtctgctgaactttactgttcctctgggaaaggagcagggacctctggaattcccatctgtttcactgtctccattccataaatctcttcctgtgtgagccaccacacccagcctgggtctctctacttttaacacatctctcatccctttcccaggattccttccaagtcagttacaggtggttttaacagaaagcatcagctctgcttcgtgacagtctctggagaaatcccttaggaagactatgagagtaggccacaaggacatgggcccacacatctgctttggctttgccggcaattcagggcttggggtattccatgtgacttgtataggtatatttgaggacagcatcttgctagagaaaaggtgagggttgtttttctttctctgaaacctacagtaaatgggtatgattgtagcttcctcagaaatcccttggcctccagagattaaacatggtgcaatggcacctctgtccaacctcctttctggtagattcctttctcctgcttcatataggccaaacctcagggcaagggaacatgggggtagagtggtgctggccagaaccatctgcttgagctacttggttgattcatatcctctttcctttatggagacccatttcctgatctctgagactgttgctgaactggcaacttacttgggcctgaaactggagaaggggtgacatttttttaatttcagagatgctttctgattttcctctcccaggtcactgtctcacctgcactctccaaactcaggttccgggaagcttgtgtgtctagatactgaattgagattctgttcagcaccttttagctctatactctctggctcccctcatcctcatggtcactgaattaaatgcttattgtattgagaaccaagatgggacctgaggacacaaagatgagctcaacagtctcagccctagaggaatagactcagggatttcaccaggtcggtgcagtatttgatttctggtgaggtgaccacagctgcagttagggaagggagccattgagcacagactttggaaggaaccttttttttgttgtttgtttgtttgtttgtttgtttgtttgtttgagacagggtcttgctctgtcacccaggctggggcgcaatggcacgatcttggctcactgcaacctctgcctcctgggttcaagtgattctcctgccacagcctcctgaggagctgggactacaggtgcgtgctaccacgcccagctacttctgtatttttagtagagacggggtttcactgtgttggccaggctggtctcgaactcctgacctcatgatctgcccgcctcagcctcccaaagtgctgggattacaagtgtgagccaccacacctggcctggaaggaacctcttaaaatcagtttacgtcttgtattttgttctgtgatggaggacactggagagagttgctattccagtcaatcatgtcgagtcactggactctgaaaatcctattggttcctttattttatttgagtttagagttcccttctgggtttgtattatgtctggcaaatgacctgggttatcacttttcctccagggttagatcatagatcttggaaactccttagagagcattttgctcctaccaaggatcagatactggagccccacataatagatttcatttcactctagcctacatagagctttctgttgctgtctcttgccatgcacttgtgcggtgattacacacttgacagtaccaggagacaaatgacttacagatcccccgacatgcctcttccccttggcaagctcagttgccctgatagtagcatgtttctgtttctgatgtaccttttttctcttcttctttgcatcagccaattcccagaatttccccaggcaatttgtagaggacctttttggggtcctatatgagccatgtcctcaaagcttttaaacctccttgctctcctacaatattcagtacatgaccactgtcatcctagaaggcttctgaaaagaggggcaagagccactctgcgccacaaaggttgggtccatcttctctccgaggttgtgaaagttttcaaattgtactaataggctggggccctgacttggctgtgggctttgggaggggtaagctgctttctagatctctcccagtgaggcatggaggtgtttctgaattttgtctacctcacagggatgttgtgaggcttgaaaaggtcaaaaaatgatggccccttgagctctttgtaagaaaggtagatgaaatatcggatgtaatctgaaaaaaagataaaatgtgacttcccctgctctgtgcagcagtcgggctggatgctctgtggcctttcttgggtcctcatgccaccccacagctccaggaaccttgaagccaatctgggggactttcagatgtttgacaaagaggtaccaggcaaacttcctgctacacatgccctgaatgaattgctaaatttcaaaggaaatggaccctgcttttaaggatgtacaaaagtatgtctgcatcgatgtctgtactgtaaatttctaatttatcactgtacaaagaaaaccccttgctatttaattttgtattaaaggaaaataaagttttgtttgttaaaaaaaaa

SEQ ID NO: 125 - DNA, 6584 bp, Homo sapiens
tgctgccatgtgccgctgccacgggtacccagcctgtcgctaaactttccgggcgccagcccggctctgagtcgcgcttctcagcggagtgacccagggacggaggacccaggctggctggggactgtctgctcttctcggcgggatccgtggagagtcctttccctggaatccgagccctaaccgtctctccccagccctatccggcgaggagcggagcgctgccagcggaggcagcgccttcccgaagcagtttatctttggacggttttctttaaaggaaaaagcaaccaacaggttgccagccccggcgccacacacgagacgccggagggagaagccccggcccggattcctctgcctgtgtgcgtccctcgcgggctgctggaggcgaggggagggagggggcgatggctcggcctgacccatccgcgccgccctcgctgttgctgctgctcctagcgcagctggtgggccgggcggccgccgcgtccaaggccccggtgtgccaggaaatcacggtgcccatgtgccgcggcatcggctacaacctgacgcacatgcccaaccagttcaaccacgacacgcaggacgaggcgggcctggaggtgcaccagttctggccgctggtggagatccaatgctcgccggacctgcgcttcttcctatgctctatgtacacgcccatctgtctgcccgactaccacaagccgctgccgccctgccgctcggtgtgcgagcgcgccaaggccggctgctcgccgctgatgcgccagtacggcttcgcctggcccgagcgcatgagctgcgaccgcctcccggtgctgggccgcgacgccgaggtcctctgcatggattacaaccgcagcgaggccaccacggcgccccccaggcctttcccagccaagcccacccttccaggcccgccaggggcgccggcctcggggggcgaatgccccgctgggggcccgttcgtgtgcaagtgtcgcgagcccttcgtgcccattctgaaggagtcacacccgctctacaacaaggtgcggacgggccaggtgcccaactgcgcggtaccctgctaccagccgtccttcagtgccgacgagcgcacgttcgccaccttctggataggcctgtggtcggtgctgtgcttcatctccacgtccaccacagtggccaccttcctcatcgacatggaacgcttccgctatcctgagcgccccatcatcttcctgtcagcctgctacctgtgcgtgtcgctgggcttcctggtgcgtctggtcgtgggccatgccagcgtggcctgcagccgcgagcacaaccacatccactacgagaccacgggccctgcactgtgcaccatcgtcttcctcctggtctacttcttcggcatggccagctccatctggtgggtcatcctgtcgctcacctggttcctggccgccggcatgaagtggggcaacgaggccatcgcgggctacgcgcagtacttccacctggctgcgtggctcatccccagcgtcaagtccatcacggcactggcgctgagctccgtggacggggacccagtggccggcatctgctacgtgggcaaccagaacctgaactcgctgcgcggcttcgtgctgggcccgctggtgctctacctgctggtgggcacgctcttcctgctggcgggcttcgtgtcgctcttccgcatccgcagcgtcatcaagcagggcggcaccaagacggacaagctggagaagctcatgatccgcatcggcatcttcacgctgctctacacggtccccgccagcattgtggtggcctgctacctgtacgagcagcactaccgcgagagctgggaggcggcgctcacctgcgcctgcccgggccacgacaccggccagccgcgcgccaagcccgagtactgggtgctcatgctcaagtacttcatgtgcctggtggtgggcatcacgtcgggcgtctggatctggtcgggcaagacggtggagtcgtggcggcgtttcaccagccgctgctgctgccgcccgcggcgcggccacaagagcgggggcgccatggccgcaggggactaccccgaggcgagcgccgcgctcacaggcaggaccgggccgccgggccccgccgccacctaccacaagcaggtgtccctgtcgcacgtgtaggaggctgccgccgagggactcggccggagagctgaggggaggggggcgttttgtttggtagttttgccaaggtcacttccgtttaccttcatggtgctgttgccccctcccgcggcgacttggagagagggaagaggggcgttttcgaggaagaacctgtcccaggtcttctccaaggggcccagctcacgtgtattctattttgcgtttcttactgccttctttatgggaaccctctttttaatttatatgtatttttcttaatttgtaactttgttgcattttggcaacaatttacctttgctttgggggctttacaatcctaaggttggcgttgtaatgaagttccacttggttcaggtttctttgaactgtgtggtctcaattgggaaaatatatttcctatacgtgtgtctttaaaaaaaaatgtgaacagtgaacgtttcggttgctgtgactgggaagttgttgggtgtgctttttcagccagcttctccttccactgcttaaagtgtccatgattctttaaggtgagctgcagtttatagccccaggtcatacctaggaggggagcataatgagctcagggcctccccaaagtgacaaggttagggagtgcttagcggttttgtgttcagccttagctttgtttatagagggaggttcagtttcttttctgtagtgcttgtaataattctcactcctaacagcaccatcgttgtgtcttgaataagttagaggtagcattatagaggatctggcataaatatttgcagtagtgagagcctaagcgatggtgattggtggagcttgaattttaggctggtgagatggcagctttgtgcctgagaggtagtgggtggttcttaagcttcagtgatcccctttttttttttttttttttttttttaaggaacttgtgttataattttggtaaaagtataaacccactccctctggacaatacttagcgacagttgctaaagggggctcctttttaaatgtaaggactgaaatggatatacttctaataagtaaatttccaacacttatttgctccaccccctcccccctcccccctccccctttatcatgttaaacagcctttttgcttttcttattcctcctctcctggagagctgtgattagaaaccacacccacccttgaatgaagtgcttgaactgggggagggaggctggctacctgtgaacaaacattggcccaaataagggaaaataagtgttcctggactttggactagtttatagccagatattccaagagcagcaagacgttgctctctgccgtctctgaaaacaaaagagatgcataacatgcttgcacaaccttttaaaatatagatcagtatagtgctacctctatagttttcttcctcttctgagaaagcctgtatattgatgatcacacacacacacactttgcaattagagaatttggtttgctttactaatctgtttaactattccttcattcattatgaacgcttatattgatgaacatacacacagaggtttctttgctattagaaaattctgtttgctttcctaatctgtttaagcattcattcatgaagagtgtggggccattactggggaaggggggtgacagtgcctcagccagcaaaataccaatgaccaggattggggactaaatttaggaagctaaaatggccagagcaattaacatttgagaaaatcctgtctaggaaaacaacttgagtgtaggcatttgtaattcacttataccaaagttggaaaagtaaaatttaagcctaggacaatttttacttcatggatgttaaatagacaaatgcatagttcccagggggaatttaaacactttactggtgggaagaaacctagtattaaagttgtaaggactctcaaaaacttcacatttattaaaatgcactgctcttacccaatttatcctctgaattaaaatttcagtggattctacaaaacctcgtacaaatagctacagaactttgtgcctattttattcctctatttattcttctaggaagaagcctcttcctagaatcttgaaatagatcccttgactgaatgccaattcctctcctgtttttcaaatgagagaaccttttctgatcaccttgaccttttccctcatttcatatgtcttcccagaaagtagacagactgctctgctgccttcagtcattgtgcctcatttgggttgtccctccttctttgtggagaaatctggaaatgatgcacagtgtatccaaaagttgtgggatgaagtggatgaaagtgatttaattcatttttagaatttttttttgttttgttttagcaacatgctgaacaactaatttactttaaaaataagccagttaaaacaaaggacgctaagcccaagtggggggcaatattagtcaggatctttggggtctaattccagaccaactttcagaagcacttctttgtctctgttctcacctctgctgtccctctcttccctcatcccctaagagagacaaagataaaagcccacctgcatccctaagtcttactgagatcagccaccccaggggagagaaactggatctacttacagccaccccctgtttccatccatatacttacttcccccaatttgcatgtgattatggaaacaagtcatgctcatgaaagcaactgtaaaataaaaggttatggagtagttcagcaacttcttcacagccagctttgtggagctggggaggacttagggcccattggagtctcttatgtgtacagcttcagggctgtccctttcagtttgattttaagcaatgcctcacttcatagcttagggggtaaggattccattcaggtaggttgtctaaaggaactaatgggacctctcagtgaattagctgaccagattttaggaaatctttttaatttctatgattttccttctcacattttgaaatggtaaaattgactggaaataatttttcttggtgccttattggttttccttgcaaacctttctcatattttctcatgaccattgccagtgaccaaggcccatgtgtgtgttgtgtgtaattgtgggcatgtacaagcttaaataacgtgccgacagcactgtttcaaagttggtattcattaggctgttgcctcctgggctggagctgcgctaatcctgacaccggctgccaggagaaaacctcatggatcacacaccaaaccttaataacagcatccgtgacctgcactctccagtacagaatgggaaccccagagctaggaaatgtagttgtatattttaatgaactgctaccccagccaaagaagcttctttcacttttgtgctctacagaaagcccaaggggggtaggagggacagagctttgaataactgctttctaacactaaatgtggccaacaggacagagcacatcacacgtataggcaggtgtgagggacagtggctaagaattgcctgctccctctgcatgctctttcttgtttccaaagtccaatcaagtgatcctgggaaacaaatctgtctggattgcggagggtggttctgaaagaactgccaagacgttaaagaagggtgaagagtaggcagaatataagtagctaacctgagtcaagactctcaaaagctagcagcctgatgacaataggatttatttcagccaggatagtgtctgtctgtgagtgcatcattttaagacagtatgacttcatgttgttacaaactatgtatagtatgtatgttttgtgggttgtatatatacataatatatattatatatatatatgagagatttggtgacttttgatacgggtttggtgcaggtgaatttattactgagccaaatgaggcacataccgagtcagtagttgaagtccagggcattcgatactgtttatgatttccatatatgtatagtgcctatcccatgctgtagtcactgttatgttaaatccagaagttacactagagccagcgatactttatttgtagacaatcaatttgaatccatatgttattactggcagatgatacatgattacagttctgaatctgtaacacttacaaaaggaaacccagagcagcttgatgagtttttgtttctgcttcgttcctgggagtcagtagaaacagcagttgtatgtggttatgttagtctcaagatacttaatttgttgaccttacttcagaaaaattttgtatgtattatatttgtgggaaggtaaaataatcatttgagatttttatcaaatatgaagattagttatttatgaaaaacaaagaaatgtctatttttctttgttcccaattaatgtagataaattttaaaatgcattaaagtaatggtaaagacaataaaaagatgctgtagaaaaaaaaaaaaaaaaaaaaaa

SEQ ID NO: 126 - DNA, 3768 bp, Homo sapiens
ccccgtgcggctctcgaggcagctccagtcccggacgcaaccccggagccgtctcaggtccctggggggaacggtgggttagacggggacgggaagggacagcggccttcgaccgccccccgagtaattgacccaggactcattttcaggaaagcctgaaaatgagtaaaatagtgaaatgaggaatttgaacattttatctttggatggggatcttctgaggatgcaaagagtgattcatccaagccatgtggtaaaatcaggaatttgaagaaaatggaaatgtttacatttttgttgacgtgtatttttctacccctcctaagagggcacagtctcttcacctgtgaaccaattactgttcccagatgtatgaaaatggcctacaacatgacgtttttccctaatctgatgggtcattatgaccagagtattgccgcggtggaaatggagcattttcttcctctcgcaaatctggaatgttcaccaaacattgaaactttcctctgcaaagcatttgtaccaacctgcatagaacaaattcatgtggttccaccttgtcgtaaactttgtgagaaagtatattctgattgcaaaaaattaattgacacttttgggatccgatggcctgaggagcttgaatgtgacagattacaatactgtgatgagactgttcctgtaacttttgatccacacacagaatttcttggtcctcagaagaaaacagaacaagtccaaagagacattggattttggtgtccaaggcatcttaagacttctgggggacaaggatataagtttctgggaattgaccagtgtgcgcctccatgccccaacatgtattttaaaagtgatgagctagagtttgcaaaaagttttattggaacagtttcaatattttgtctttgtgcaactctgttcacattccttacttttttaattgatgttagaagattcagatacccagagagaccaattatatattactctgtctgttacagcattgtatctcttatgtacttcattggatttttgctaggcgatagcacagcctgcaataaggcagatgagaagctagaacttggtgacactgttgtcctaggctctcaaaataaggcttgcaccgttttgttcatgcttttgtattttttcacaatggctggcactgtgtggtgggtgattcttaccattacttggttcttagctgcaggaagaaaatggagttgtgaagccatcgagcaaaaagcagtgtggtttcatgctgttgcatggggaacaccaggtttcctgactgttatgcttcttgctatgaacaaagttgaaggagacaacattagtggagtttgctttgttggcctttatgacctggatgcttctcgctactttgtactcttgccactgtgcctttgtgtgtttgttgggctctctcttcttttagctggcattatttccttaaatcatgttcgacaagtcatacaacatgatggccggaaccaagaaaaactaaagaaatttatgattcgaattggagtcttcagcggcttgtatcttgtgccattagtgacacttctcggatgttacgtctatgagcaagtgaacaggattacctgggagataacttgggtctctgatcattgtcgtcagtaccatatcccatgtccttatcaggcaaaagcaaaagctcgaccagaattggctttatttatgataaaatacctgatgacattaattgttggcatctctgctgtcttctgggttggaagcaaaaagacatgcacagaatgggctgggttttttaaacgaaatcgcaagagagatccaatcagtgaaagtcgaagagtactacaggaatcatgtgagtttttcttaaagcacaattctaaagttaaacacaaaaagaagcactataaaccaagttcacacaagctgaaggtcatttccaaatccatgggaaccagcacaggagctacagcaaatcatggcacttctgcagtagcaattactagccatgattacctaggacaagaaactttgacagaaatccaaacctcaccagaaacatcaatgagagaggtgaaagcggacggagctagcacccccaggttaagagaacaggactgtggtgaacctgcctcgccagcagcatccatctccagactctctggggaacaggtcgacgggaagggccaggcaggcagtgtatctgaaagtgcgcggagtgaaggaaggattagtccaaagagtgatattactgacactggcctggcacagagcaacaatttgcaggtccccagttcttcagaaccaagcagcctcaaaggttccacatctctgcttgttcacccggtttcaggagtgagaaaagagcagggaggtggttgtcattcagatacttgaagaacattttctctcgttactcagaagcaaatttgtgttacactggaagtgacctatgcactgttttgtaagaatcactgttacgttcttcttttgcacttaaagttgcattgcctactgttatactggaaaaaatagagttcaagaataatatgactcatttcacacaaaggttaatgacaacaatatacctgaaaacagaaaatgtgcaggttaataatatttttttaatagtgtgggaggacagagttagaggaatcttccttttctatttatgaagattctactcttggtaagagtattttaagatgtactatgctattttacttttttgatataaaatcaagatatttctttgctgaagtatttaaatcttatccttgtatctttttatacatatttgaaaataagcttatatgtatttgaacttttttgaaatcctattcaagtatttttatcatgctattgtgatattttagcactttggtagcttttacactgaatttctaagaaaattgtaaaatagtcttcttttatactgtaaaaaaagatataccaaaaagtcttataataggaatttaactttaaaaacccacttattgataccttaccatctaaaatgtgtgatttttatagtctcgttttaggaatttcacagatctaaattatgtaactgaaataaggtgcttactcaaagagtgtccactattgattgtattatgctgctcactgatccttctgcatatttaaaataaaatgtcctaaagggttagtagacaaaatgttagtcttttgtatattaggccaagtgcaattgacttcccttttttaatgtttcatgaccacccattgattgtattataaccacttacagttgcttatattttttgttttaacttttgttttttaacatttagaatattacattttgtattatacagtacctttctcagacattttgtagaattcatttcggcagctcactaggattttgctgaacattaaaaagtgtgatagcgatattagtgccaatcaaatggaaaaaaggtagtcttaataaacaagacacaacgtttttatacaacatactttaaaatattaaggagttttcttaattttgtttcctattaagtattattctttgggcaagattttctgatgcttttgattttctctcaatttagcatttgcttttggtttttttctctatttagcattctgttaaggcacaaaaactatgtactgtatgggaaatgttgtaaatattaccttttccacattttaaacagacaactttgaatacaaaaactttgttttgtgtgatcttttcattaataaaattatctttgtataagaaaaaaaaaaaaaaaa

SEQ ID NO: 127 - DNA, 3851 bp, Homo sapiens
ctctcccaaccgcctcgtcgcactcctcaggctgagagcaccgctgcactcgcggccggcgatgcgggaccccggcgcggccgctccgctttcgtccctgggcctctgtgccctggtgctggcgctgctgggcgcactgtccgcgggcgccggggcgcagccgtaccacggagagaagggcatctccgtgccggaccacggcttctgccagcccatctccatcccgctgtgcacggacatcgcctacaaccagaccatcctgcccaacctgctgggccacacgaaccaagaggacgcgggcctcgaggtgcaccagttctacccgctggtgaaggtgcagtgttctcccgaactccgctttttcttatgctccatgtatgcgcccgtgtgcaccgtgctcgatcaggccatcccgccgtgtcgttctctgtgcgagcgcgcccgccagggctgcgaggcgctcatgaacaagttcggcttccagtggcccgagcggctgcgctgcgagaacttcccggtgcacggtgcgggcgagatctgcgtgggccagaacacgtcggacggctccgggggcccaggcggcggccccactgcctaccctaccgcgccctacctgccggacctgcccttcaccgcgctgcccccgggggcctcagatggcagggggcgtcccgccttccccttctcatgcccccgtcagctcaaggtgcccccgtacctgggctaccgcttcctgggtgagcgcgattgtggcgccccgtgcgaaccgggccgtgccaacggcctgatgtactttaaggaggaggagaggcgcttcgcccgcctctgggtgggcgtgtggtccgtgctgtgctgcgcctcgacgctctttaccgttctcacctacctggtggacatgcggcgcttcagctacccagagcggcccatcatcttcctgtcgggctgctacttcatggtggccgtggcgcacgtggccggcttccttctagaggaccgcgccgtgtgcgtggagcgcttctcggacgatggctaccgcacggtggcgcagggcaccaagaaggagggctgcaccatcctcttcatggtgctctacttcttcggcatggccagctccatctggtgggtcattctgtctctcacttggttcctggcggccggcatgaagtggggccacgaggccatcgaggccaactcgcagtacttccacctggccgcgtgggccgtgcccgccgtcaagaccatcactatcctggccatgggccaggtagacggggacctgctgagcggggtgtgctacgttggcctctccagtgtggacgcgctgcggggcttcgtgctggcgcctctgttcgtctacctcttcataggcacgtccttcttgctggccggcttcgtgtccctcttccgtatccgcaccatcatgaaacacgacggcaccaagaccgagaagctggagaagctcatggtgcgcatcggcgtcttcagcgtgctctacacagtgcccgccaccatcgtcctggcctgctacttctacgagcaggccttccgcgagcactgggagcgcacctggctcctgcagacgtgcaagagctatgccgtgccctgcccgcccggccacttcccgcccatgagccccgacttcaccgtcttcatgatcaagtacctgatgaccatgatcgtcggcatcaccactggcttctggatctggtcgggcaagaccctgcagtcgtggcgccgcttctaccacagacttagccacagcagcaagggggagactgcggtatgagccccggcccctccccacctttcccaccccagccctcttgcaagaggagaggcacggtagggaaaagaactgctgggtgggggcctgtttctgtaactttctccccctctactgagaagtgacctggaagtgagaagttctttgcagatttggggcgaggggtgatttggaaaagaagacctgggtggaaagcggtttggatgaaaagatttcaggcaaagacttgcaggaagatgatgataacggcgatgtgaatcgtcaaaggtacgggccagcttgtgcctaatagaaggttgagaccagcagagactgctgtgagtttctcccggctccgaggctgaacggggactgtgagcgatccccctgctgcagggcgagtggcctgtccagacccctgtgaggccccgggaaaggtacagccctgtctgcggtggctgctttgttggaaagagggagggcctcctgcggtgtgcttgtcaagcagtggtcaaaccataatctcttttcactggggccaaactggagcccagatgggttaatttccagggtcagacattacggtctctcctcccctgccccctcccgcctgtttttcctcccgtactgctttcaggtcttgtaaaataagcatttggaagtcttgggaggcctgcctgctagaatcctaatgtgaggatgcaaaagaaatgatgataacattttgagataaggccaaggagacgtggagtaggtatttttgctactttttcattttctggggaaggcaggaggcagaaagacgggtgttttatttggtctaataccctgaaaagaagtgatgacttgttgcttttcaaaacaggaatgcatttttccccttgtctttgttgtaagagacaaaagaggaaacaaaagtgtctccctgtggaaaggcataactgtgacgaaagcaacttttataggcaaagcagcgcaaatctgaggtttcccgttggttgttaatttggttgagataaacattcctttttaaggaaaagtgaagagcagtgtgctgtcacacaccgttaagccagaggttctgacttcgctaaaggaaatgtaagaggttttgttgtctgttttaaataaatttaattcggaacacatgatccaacagactatgttaaaatattcagggaaatctctcccttcatttactttttcttgctataagcctatatttaggtttcttttctatttttttctcccatttggatcctttgaggtaaaaaaacataatgtcttcagcctcataataaaggaaagttaattaaaaaaaaaaagcaaagagccattttgtcctgttttcttggttccatcaatctgtttattaaacatcatccatatgctgaccctgtctctgtgtggttgggttgggaggcgatcagcagataccatagtgaacgaagaggaaggtttgaaccatgggccccatctttaaagaaagtcattaaaagaaggtaaacttcaaagtgattctggagttctttgaaatgtgctggaagacttaaatttattaatcttaaatcatgtactttttttctgtaatagaactcggattcttttgcatgatggggtaaagcttagcagagaatcatgggagctaacctttatcccacctttgacactaccctccaatcttgcaacactatcctgtttctcagaacagtttttaaatgccaatcatagagggtactgtaaagtgtacaagttactttatatatgtaatgttcacttgagtggaactgctttttacattaaagttaaaatcgatcttgtgtttcttcaaccttcaaaactatctcatctgtcagatttttaaaactccaacacaggttttggcatcttttgtgctgtatcttttaagtgcatgtgaaatttgtaaaatagagataagtacagtatgtatattttgtaaatctcccatttttgtaagaaaatatatattgtatttatacatttttactttggatttttgttttgttggctttaaaggtctaccccactttatcacatgtacagatcacaaataaatttttttaaatac

SEQ ID NO: 128 - DNA, 3195 bp, Homo sapiens
acagcatggagtggggttacctgttggaagtgacctcgctgctggccgccttggcgctgctgcagcgctctagcggcgctgcggccgcctcggccaaggagctggcatgccaagagatcaccgtgccgctgtgtaagggcatcggctacaactacacctacatgcccaatcagttcaaccacgacacgcaagacgaggcgggcctggaggtgcaccagttctggccgctggtggagatccagtgctcgcccgatctcaagttcttcctgtgcagcatgtacacgcccatctgcctagaggactacaagaagccgctgccgccctgccgctcggtgtgcgagcgcgccaaggccggctgcgcgccgctcatgcgccagtacggcttcgcctggcccgaccgcatgcgctgcgaccggctgcccgagcaaggcaaccctgacacgctgtgcatggactacaaccgcaccgacctaaccaccgccgcgcccagcccgccgcgccgcctgccgccgccgccgcccggcgagcagccgccttcgggcagcggccacggccgcccgccgggggccaggcccccgcaccgcggaggcggcaggggcggtggcggcggggacgcggcggcgcccccagctcgcggcggcggcggtggcgggaaggcgcggccccctggcggcggcgcggctccctgcgagcccgggtgccagtgccgcgcgcctatggtgagcgtgtccagcgagcgccacccgctctacaaccgcgtcaagacaggccagatcgctaactgcgcgctgccctgccacaacccctttttcagccaggacgagcgcgccttcaccgtcttctggatcggcctgtggtcggtgctctgcttcgtgtccaccttcgccaccgtctccaccttccttatcgacatggagcgcttcaagtacccggagcggcccattatcttcctctcggcctgctacctcttcgtgtcggtgggctacctagtgcgcctggtggcgggccacgagaaggtggcgtgcagcggtggcgcgccgggcgcggggggcgctgggggcgcgggcggcgcggcggcgggcgcgggcgcggcgggcgcgggcgcgggcggcccgggcgggcgcggcgagtacgaggagctgggcgcggtggagcagcacgtgcgctacgagaccaccggccccgcgctgtgcaccgtggtcttcttgctggtctacttcttcggcatggccagctccatctggtgggtgatcttgtcgctcacatggttcctggcggccggtatgaagtggggcaacgaagccatcgccggctactcgcagtacttccacctggccgcgtggcttgtgcccagcgtcaagtccatcgcggtgctggcgctcagctcggtggacggcgacccggtggcgggcatctgctacgtgggcaaccagagcctggacaacctgcgcggcttcgtgctggcgccgctggtcatctacctcttcatcggcaccatgttcctgctggccggcttcgtgtccctgttccgcatccgctcggtcatcaagcaacaggacggccccaccaagacgcacaagctggagaagctgatgatccgcctgggcctgttcaccgtgctctacaccgtgcccgccgcggtggtggtcgcctgcctcttctacgagcagcacaaccgcccgcgctgggaggccacgcacaactgcccgtgcctgcgggacctgcagcccgaccaggcacgcaggcccgactacgccgtcttcatgctcaagtacttcatgtgcctagtggtgggcatcacctcgggcgtgtgggtctggtccggcaagacgctggagtcctggcgctccctgtgcacccgctgctgctgggccagcaagggcgccgcggtgggcgggggcgcgggcgccacggccgcggggggtggcggcgggccggggggcggcggcggcgggggacccggcggcggcggggggccgggcggcggcgggggctccctctacagcgacgtcagcactggcctgacgtggcggtcgggcacggcgagctccgtgtcttatccaaagcagatgccattgtcccaggtctgagcggaggggagggggcgcccaggaggggtggggaggggggcgaggagacccaagtgcagcgaagggacacttgatgggctgaggttcccaccccttcacagtgttgattgctattagcatgataatgaactcttaatggtatccattagctgggacttaaatgactcacttagaacaaagtacctggcattgaagcctcccagacccagccccttttcctccattgatgtgcggggagctcctcccgccacgcgttaatttctgttggctgaggagggtggactctgcggcgtttccagaacccgagatttggagccctccctggctgcacttggctgggtttgcagtcagatacacagatttcacctgggagaacctctttttctccctcgactcttcctacgtaaactcccacccctgacttaccctggaggaggggtgaccgccacctgatgggattgcacggtttgggtattcttaatgaccaggcaaatgccttaagtaaacaaacaagaaatgtcttaattatacaccccacgtaaatacgggtttcttacattagaggatgtatttatataattatttgttaaattgtaaaaaaaaaaagtgtaaaatatgtatatatccaaagatatagtgtgtacatttttttgtaaaaagtttagaggcttacccctgtaagaacagatataagtattctattttgtcaataaaatgacttttgataaatgatttaaccattgccctctcccccgcctcttctgagctgtcacctttaaagtgcttgctaaggacgcatggggaaaatggacattttctggcttgtcattctgtacactgaccttaggcatggagaaaattacttgttaaactctagttcttaagttgttagccaagtaaatatcattgttgaactgaaatcaaaattgagtttttgcaccttccccaaagacggtgtttttcatgggagctcttttctgatccatggataacaactctcactttagtggatgtaaatggaacttctgcaaggcagtaattccccttaggccttgttatttatcctgcatggtatcactaaaggtttcaaaaccctgaaaaaaaa

SEQ ID NO: 129 - DNA, 2342 bp, Homo sapiens
gctctggctcagcggcggctccggtggcagcggcggtggcggctaggcgggctcggcggctcctgtccctcgggcggctgcccgctcgctgcccagggcgcccggacacacgtgggcggctcagcgatggcccgcgccccgcgacgtggcgggcaggcaccggggcgcgggaccgctgagcccgagtgagccggggccgcgctcccgccttcggcccgggcctcccgggatggccgtggcgcctctgcggggggcgctgctgctgtggcagctgctggcggcgggcggcgcggcactggagatcggccgcttcgacccggagcgcgggcgcggggctgcgccgtgccaggcggtggagatccccatgtgccgcggcatcggctacaacctgacccgcatgcccaacctgctgggccacacgtcgcagggcgaggcggctgccgagctagcggagttcgcgccgctggtgcagtacggctgccacagccacctgcgcttcttcctgtgctcgctctacgcgcccatgtgcaccgaccaggtctcgacgcccattcccgcctgccggcccatgtgcgagcaggcgcgcctgcgctgcgcgcccatcatggagcagttcaacttcggctggccggactcgctcgactgcgcccggctgcccacgcgcaacgacccgcacgcgctgtgcatggaggcgcccgagaacgccacggccggccccgcggagccccacaagggcctgggcatgctgcccgtggcgccgcggcccgcgcgccctcccggagacctgggcccgggcgcgggcggcagtggcacctgcgagaaccccgagaagttccagtacgtggagaagagccgctcgtgcgcaccgcgctgcgggcccggcgtcgaggtgttctggtcccggcgcgacaaggacttcgcgctggtctggatggccgtgtggtcggcgctgtgcttcttctccaccgccttcactgtgctcaccttcttgctggagccccaccgcttccagtaccccgagcgccccatcatcttcctctccatgtgctacaacgtctactcgctggccttcctgatccgtgcggtggccggagcgcagagcgtggcctgtgaccaggaggcgggcgcgctctacgtgatccaggagggcctggagaacacgggctgcacgctggtcttcctactgctctactacttcggcatggccagctcgctctggtgggtggtcctgacgctcacctggttcctggctgccgggaagaaatggggccacgaggccatcgaggcccacggcagctatttccacatggctgcctggggcctgcccgcgctcaagaccatcgtcatcctgaccctgcgcaaggtggcgggtgatgagctgactgggctttgctacgtggccagcacggatgcagcagcgctcacgggcttcgtgctggtgcccctctctggctacctggtgctgggcagtagtttcctcctgaccggcttcgtggccctcttccacatccgcaagatcatgaagacgggcggcaccaacacagagaagctggagaagctcatggtcaagatcggggtcttctccatcctctacacggtgcccgccacctgcgtcatcgtttgctatgtctacgaacgcctcaacatggacttctggcgccttcgggccacagagcagccatgcgcagcggccgcggggcccggaggccggagggactgctcgctgccagggggctcggtgcccaccgtggcggtcttcatgctcaaaattttcatgtcactggtggtggggatcaccagcggcgtctgggtgtggagctccaagactttccagacctggcagagcctgtgctaccgcaagatagcagctggccgggcccgggccaaggcctgccgcgcccccgggagctacggacgtggcacgcactgccactataaggctcccaccgtggtcttgcacatgactaagacggacccctctttggagaaccccacacacctctagccacacaggcctggcgcggggtggctgctgccccctccttgccctccacgccctgccccctgcatcccctagagacagctgactagcagctgcccagctgtcaaggtcaggcaagtgagcaccggggactgaggatcagggcgggaccccgtgaggctcattaggggagatgggggtctcccctaatgcgggggctggaccaggctgagtccccacagggtcctagtggaggatgtggaggggcggggcagaggggtccagccggagtttatttaatgatgtaatttattgttgcgttcctctggaagctgtgactggaataaacccccgcgtggca

SEQ ID NO: 130 - DNA, 1310 bp, Homo sapiens
aaattgagcccgcagcctcccgcttcgctctctgctcctcctgttcgacagtcagccgcatcttcttttgcgtcgccagccgagccacatcgctcagacaccatggggaaggtgaaggtcggagtcaacggatttggtcgtattgggcgcctggtcaccagggctgcttttaactctggtaaagtggatattgttgccatcaatgaccccttcattgacctcaactacatggtttacatgttccaatatgattccacccatggcaaattccatggcaccgtcaaggctgagaacgggaagcttgtcatcaatggaaatcccatcaccatcttccaggagcgagatccctccaaaatcaagtggggcgatgctggcgctgagtacgtcgtggagtccactggcgtcttcaccaccatggagaaggctggggctcatttgcaggggggagccaaaagggtcatcatctctgccccctctgctgatgcccccatgttcgtcatgggtgtgaaccatgagaagtatgacaacagcctcaagatcatcagcaatgcctcctgcaccaccaactgcttagcacccctggccaaggtcatccatgacaactttggtatcgtggaaggactcatgaccacagtccatgccatcactgccacccagaagactgtggatggcccctccgggaaactgtggcgtgatggccgcggggctctccagaacatcatccctgcctctactggcgctgccaaggctgtgggcaaggtcatccctgagctgaacgggaagctcactggcatggccttccgtgtccccactgccaacgtgtcagtggtggacctgacctgccgtctagaaaaacctgccaaatatgatgacatcaagaaggtggtgaagcaggcgtcggagggccccctcaagggcatcctgggctacactgagcaccaggtggtctcctctgacttcaacagcgacacccactcctccacctttgacgctggggctggcattgccctcaacgaccactttgtcaagctcatttcctggtatgacaacgaatttggctacagcaacagggtggtggacctcatggcccacatggcctccaaggagtaagacccctggaccaccagccccagcaagagcacaagaggaagagagagaccctcactgctggggagtccctgccacactcagtcccccaccacactgaatctcccctcctcacagttgccatgtagaccccttgaagaggggaggggcctagggagccgcaccttgtcatgtaccatcaataaagtaccctgtgctcaacc

SEQ ID NO: 131 - DNA, 440 bp, Homo sapiens
ggcaccacacacctcccagctctgcagacgagatgcagcgactatgtgtgtatgtgctgatctttgcactggctctggccgccttctctgaagcttcttggaagccccgctcccagcagccagatgcacccttaggtacaggggccaacagggacctggagctaccctggctggagcagcagggcccagcctctcatcatcgaaggcagctgggaccccagggtcccccacacctcgtggcagacccgtccaagaagcagggaccatggctggaggaagaagaagaagcctatggatggatggacttcggccgccgcagtgctgaggatgagaactaacaatcctagaaccaagcttcagagcctagccacctcccaccccactccagccctgtcccctgaaaaactgatcaaaaataaactagtttccagtggaaaaaa

SEQ ID NO: 132 - DNA, 3130 bp, Homo sapiens
gagtcagtggcttgaaacttttaaaagctctgtgctccaagttacaaaaaagcttttacgaggtatcagcacttttctttcattagggggaaggcgtgaggaaagtaccaaacagcagcggagttttaaactttaaatagacaggtctgagtgcctgaacttgccttttcattttacttcatcctccaaggagttcaatcacttggcgtgacttcactacttttaagcaaaagagtggtgcccaggcaacatgggtgactggagcgccttaggcaaactccttgacaaggttcaagcctactcaactgctggagggaaggtgtggctgtcagtacttttcattttccgaatcctgctgctggggacagcggttgagtcagcctggggagatgagcagtctgcctttcgttgtaacactcagcaacctggttgtgaaaatgtctgctatgacaagtctttcccaatctctcatgtgcgcttctgggtcctgcagatcatatttgtgtctgtacccacactcttgtacctggctcatgtgttctatgtgatgcgaaaggaagagaaactgaacaagaaagaggaagaactcaaggttgcccaaactgatggtgtcaatgtggacatgcacttgaagcagattgagataaagaagttcaagtacggtattgaagagcatggtaaggtgaaaatgcgaggggggttgctgcgaacctacatcatcagtatcctcttcaagtctatctttgaggtggccttcttgctgatccagtggtacatctatggattcagcttgagtgctgtttacacttgcaaaagagatccctgcccacatcaggtggactgtttcctctctcgccccacggagaaaaccatcttcatcatcttcatgctggtggtgtccttggtgtccctggccttgaatatcattgaactcttctatgttttcttcaagggcgttaaggatcgggttaagggaaagagcgacccttaccatgcgaccagtggtgcgctgagccctgccaaagactgtgggtctcaaaaatatgcttatttcaatggctgctcctcaccaaccgctcccctctcgcctatgtctcctcctgggtacaagctggttactggcgacagaaacaattcttcttgccgcaattacaacaagcaagcaagtgagcaaaactgggctaattacagtgcagaacaaaatcgaatggggcaggcgggaagcaccatctctaactcccatgcacagccttttgatttccccgatgataaccagaattctaaaaaactagctgctggacatgaattacagccactagccattgtggaccagcgaccttcaagcagagccagcagtcgtgccagcagcagacctcggcctgatgacctggagatctagatacaggcttgaaagcatcaagattccactcaattgtggagaagaaaaaaggtgctgtagaaagtgcaccaggtgttaattttgatccggtggaggtggtactcaacagccttattcatgaggcttagaaaacacaaagacattagaatacctaggttcactgggggtgtatggggtagatgggtggagagggaggggataagagaggtgcatgttggtatttaaagtagtggattcaaagaacttagattataaataagagttccattaggtgatacatagataagggctttttctccccgcaaacacccctaagaatggttctgtgtatgtgaatgagcgggtggtaattgtggctaaatatttttgttttaccaagaaactgaaataattctggccaggaataaatacttcctgaacatcttaggtcttttcaacaagaaaaagacagaggattgtccttaagtccctgctaaaacattccattgttaaaatttgcactttgaaggtaagctttctaggcctgaccctccaggtgtcaatggacttgtgctactatatttttttattcttggtatcagtttaaaattcagacaaggcccacagaataagattttccatgcatttgcaaatacgtatattctttttccatccacttgcacaatatcattaccatcactttttcatcattcctcagctactactcacattcatttaatggtttctgtaaacatttttaagacagttgggatgtcacttaacattttttttttgagctaaagtcagggaatcaagccatgcttaatatttaacaatcacttatatgtgtgtcgaagagtttgttttgtttgtcatgtattggtacaagcagatacagtataaactcacaaacacagatttgaaaataatgcacatatggtgttcaaatttgaacctttctcatggatttttgtggtgtgggccaatatggtgtttacattatataattcctgctgtggcaagtaaagcacactttttttttctcctaaaatgtttttccctgtgtatcctattatggatactggttttgttaattatgattctttattttctctcctttttttaggatatagcagtaatgctattactgaaatgaatttcctttttctgaaatgtaatcattgatgcttgaatgatagaattttagtactgtaaacaggctttagtcattaatgtgagagacttagaaaaaatgcttagagtggactattaaatgtgcctaaatgaattttgcagtaactggtattcttgggttttcctacttaatacacagtaattcagaacttgtattctattatgagtttagcagtcttttggagtgaccagcaactttgatgtttgcactaagattttatttggaatgcaagagaggttgaaagaggattcagtagtacacatacaactaatttatttgaactatatgttgaagacatctaccagtttctccaaatgccttttttaaaactcatcacagaagattggtgaaaatgctgagtatgacacttttcttcttgcatgcatgtcagctacataaacagttttgtacaatgaaaattactaatttgtttgacattccatgttaaactacggtcatgttcagcttcattgcatgtaatgtagacctagtccatcagatcatgtgttctggagagtgttctttattcaataaagttttaatttagtataaacata

SEQ ID NO: 133 - DNA, 2215 bp, Homo sapiens
atgggatgtactctgagcgcagaggagagagccgccctcgagcggagcaaggcgattgagaaaaacctcaaagaggatggcatcagcgccgccaaagacgtgaaattactcctgctcggggctggagaatcaggaaaaagcaccattgtgaagcagatgaagatcatccatgaagatggcttctccggagaagacgtgaaacagtacaagcctgttgtctacagcaacactatccagtccctggcagccatcgtccgggccatggacactttgggcatcgaatatggtgataaggagagaaaggctgacgccaagatggtgtgtgatgtggtgagtcggatggaagacaccgagcccttctctgcagagctgctttctgccatgatgcggctctggggcgactcaggaatccaagagtgcttcaaccggtcccgggagtatcaactcaacgactctgccaaatactacctggacagcctggatcggattggggccgccgactaccagcccactgagcaggacatcctccgaaccagggtcaaaaccactggcatcgtagaaacccacttcacattcaagaacctccacttcaggctgtttgacgtcggaggccagcgatctgaacgcaagaagtggatccattgcttcgaggacgtcacggccatcattttctgtgtcgcgctcagcggctatgaccaggtgctccacgaagacgaaaccacgaaccgcatgcacgagtctctcatgctcttcgactccatctgtaacaacaagttcttcatcgatacctccatcattctcttcctcaacaagaaagatctctttggcgagaagatcaagaagtcacctttgaccatctgctttcctgaatacacaggccccaatacctatgaagacgcagccgcctacatccaagcacaatttgaaagcaaaaaccgctcacccaacaaagaaatatattgtcacatgacttgtgccacagacacgaataacatccaggtggtgttcgacgccgtcaccgacatcatcattgccaacaacctccggggctgcggcttgtactgacctcttgtcctgtatagcaacctattttgactgcttcacggactctttgctgttgacgttgatctcctggtagcatgaccttttggcctttgtaagacacacagcctttctgtatcaagcccctgtctaacctacgaccccagagtgactgacggctgtgtatttctgtagaatgctgtagaatccggttttagttgagtcttcacatttagaatttgaaaggaaaaacagaacatttctcatgtgctttgtagcttaaaaaaaggaaaactcaccatttcaaccatatttctttttcttgcaaaacaaacatacccatctgcaccgacgcctgccccgtcccacctcgcgcgagcccctggagctcctgctgggggaggcccatctgccgcctggggctccggtgcggtgcatggtccgaggagtgtgctcaggccgggctttccagaaggcacaggccactgcaaaccctgctgctgccggccgcccagacaccacagacgccactggcggccctaagccactcccgccacacgctcactccaggttcgtatagaaaaagcacagctctcactggccagtagctgccaaaaagaacacccatcgtataaggaaatccagccccatagaaaacaatctgcccaccgaccccctttctaaggatagcctttgtaggggttttttggttcctttttttttttttcagtttgtgtttttacttttgtcccgccgagtactatgtattaccagcccccacccacagatcagtttcctagtctttgggaaacgggttgtgttttttttcctttgccgtgttggatttccggtcgcggctgacacctcccttcgtgtgtgcgcccctccccacccctgcctgtgttctgtgccctgtgtccgctctctcatgtggggatgtttgtgctgcagacaaaaagaacaaaaaaaaatttttaaataccacaagatggaaaaaaaaaacaaaaaaatttaaaaagatggaatgtagtgtttacattaaagccgccgttttcatgaccaatcctatgtcatttctactttgactaatacccaaaccctaaacctcttcacggtttcacttttaagacttaatctgtgctgaagaagaccagtcacagccatttcaaataaa

SEQ ID NO: 134 - DNA, 2188 bp, Homo sapiens
agggggtgccggcggggctgcagcggaggcactttggaagaatgactctggagtccatcatggcgtgctgcctgagcgaggaggccaaggaagcccggcggatcaacgacgagatcgagcggcagctccgcagggacaagcgggacgcccgccgggagctcaagctgctgctgctcgggacaggagagagtggcaagagtacgtttatcaagcagatgagaatcatccatgggtcaggatactctgatgaagataaaaggggcttcaccaagctggtgtatcagaacatcttcacggccatgcaggccatgatcagagccatggacacactcaagatcccatacaagtatgagcacaataaggctcatgcacaattagttcgagaagttgatgtggagaaggtgtctgcttttgagaatccatatgtagatgcaataaagagtttatggaatgatcctggaatccaggaatgctatgatagacgacgagaatatcaattatctgactctaccaaatactatcttaatgacttggaccgcgtagctgaccctgcctacctgcctacgcaacaagatgtgcttagagttcgagtccccaccacagggatcatcgaatacccctttgacttacaaagtgtcattttcagaatggtcgatgtagggggccaaaggtcagagagaagaaaatggatacactgctttgaaaatgtcacctctatcatgtttctagtagcgcttagtgaatatgatcaagttctcgtggagtcagacaatgagaaccgaatggaggaaagcaaggctctctttagaacaattatcacatacccctggttccagaactcctcggttattctgttcttaaacaagaaagatcttctagaggagaaaatcatgtattcccatctagtcgactacttcccagaatatgatggaccccagagagatgcccaggcagcccgagaattcattctgaagatgttcgtggacctgaacccagacagtgacaaaattatctactcccacttcacgtgcgccacagacaccgagaatatccgctttgtctttgctgccgtcaaggacaccatcctccagttgaacctgaaggagtacaatctggtctaattgtgcctcctagacacccgccctgcccttccctggtgggctattgaagatacacaagagggactgtatttctgtggaaaacaatttgcataatactaatttattgccgtcctggactctgtgtgagcgtgtccacagagtttgtagtaaatattatgattttatttaaactattcagaggaaaaacagaggatgctgaagtacagtcccagcacatttcctctctatcttttttttaggcaaaaccttgtgactcagtgtattttaaattctcagtcatgcactcacaaagataagacttgtttctttctgtctctctctctttttcttttctatggagcaaaacaaagctgatttcccttttttcttcccccgctaattcatacctccctcctgatgtttttcccaggttacaatggcctttatcctagttccattcttggtcaagtttttctctcaaatgatacagtcaggacacatcgttcgatttaagccatcatcagcttaatttaagtttgtagtttttgctgaaggattatatgtattaatacttacggttttaaatgtgttgctttggatacacacatagtttcttttttaatagaatatactgtcttgtctcactttggactgggacagtggatgcccatctaaaagttaagtgtcatttcttttagatgtttaccttcagccatagcttgattgctcagagaaatatgcagaaggcaggatcaaagacacacaggagtcctttcttttgaaatgccacgtgccattgtctttcctcccttctttgcttctttttcttaccctctctttcaattgcagatgccaaaaaagatgccaacagacactacattaccctaatggctgctacccagaacctttttataggttgttcttaatttttttgttgttgttgttcaagcttttcctttcttttttttcttagtgtttgggccacgattttaaaatgacttttattatgggtatgtgttgccaaagctggctttttgtcaaataaaatgaatacgaacttaaaaaataaaaaaaaaaaaaaaaaaaaa

SEQ ID NO: 135 - DNA, 3303 bp, Homo sapiens
agttctcgcgggacaccgacggggagcggaagccaggaggtattgctgcttcggcgaccgggcggcggcagcggcggcggcggctgtggcagagtctgtgcctgtggcggtgacggcggcgggagcaagcgctgccctcgcagagcagccttggggtcgccggccgctcgcagcgttgtggaggggcgggccggacgctgagcggagcagctgcgccacgggtggcattgtgtgtcccagagtgccggagcgagtcccagaagagaggcgaggctaagcccagagcgctgggttgcttcagcagggaagactcccttccccctgcttcaggctgctgagcactgagcagcgctcagaatggaagccatcgccaaatatgacttcaaagctactgcagacgacgagctgagcttcaaaaggggggacatcctcaaggttttgaacgaagaatgtgatcagaactggtacaaggcagagcttaatggaaaagacggcttcattcccaagaactacatagaaatgaaaccacatccgtggttttttggcaaaatccccagagccaaggcagaagaaatgcttagcaaacagcggcacgatggggcctttcttatccgagagagtgagagcgctcctggggacttctccctctctgtcaagtttggaaacgatgtgcagcacttcaaggtgctccgagatggagccgggaagtacttcctctgggtggtgaagttcaattctttgaatgagctggtggattatcacagatctacatctgtctccagaaaccagcagatattcctgcgggacatagaacaggtgccacagcagccgacatacgtccaggccctctttgactttgatccccaggaggatggagagctgggcttccgccggggagattttatccatgtcatggataactcagaccccaactggtggaaaggagcttgccacgggcagaccggcatgtttccccgcaattatgtcacccccgtgaaccggaacgtctaagagtcaagaagcaattatttaaagaaagtgaaaaatgtaaaacacatacaaaagaattaaacccacaagctgcctctgacagcagcctgtgagggagtgcagaacacctggccgggtcaccctgtgaccctctcactttggttggaactttagggggtgggagggggcgttggatttaaaaatgccaaaacttacctataaattaagaagagtttttattacaaattttcactgctgctcctctttcccctcctttgtcttttttttcatccttttttctcttctgtccatcagtgcatgacgtttaaggccacgtatagtcctagctgacgccaataataaaaaacaagaaaccaagtgggctggtattctctctatgcaaaatgtctgttttagttggaatgactgaaagaagaacagctgttcctgtgttcttcgtatatacacacaaaaaggagcgggcagggccgctcgatgcctttgctgtttagcttcctccagaggaggggacttgtaggaatctgccttccagcccagacccccagtgtattttgtccaagttcacagtagagtagggtagaaggaaagcatgtctctgcttccatggcttcctgagaaagcccacctgggctgggcgcggtggctcacgcctgtaatcccagcactttgggaggccaaggtgggcggatcacaaggtcaggagttcgagaccaacctagccaacatggtgaaaccccgtctctactaaaaataagaaattagccgggtgtggcacgcacctgtagtcccagctacttgggagcctgaggcaggagaatcgcttgaacctgggaagtggaggttgagtgagccgggaccgtgccattgtactccagcctgggtgacagagcgagattccgtctcaaaaaaaaaaaaaaaaagcccacctgaaagcctgtctctttccactttgttggcccttccagtgggattatcgagcatgttgttttttcatagtgcctttttccttatttcaagggttgcttctgagtggtgttttttttttttttttaatttgttttgttttaaaataagttaaaggcagtccagagcttttcagccaatttgtctcctactctgtgtaaatatttttccctccgggcaggggagccagggtagagcaaaggagacaaagcaggagtggaaggtgaggcgttctcctgcttgtactaagccaggaggctttaagctccagctttaagggttgtgagccccttgggggttcagggaactgcttgcccagggtgcagtgtgagtgtgatgggccaccggggcaagagggaaggtgaccgcccagctctcccacatcccactggatctggcttacaggggggtcggaagcctgtcctcaccgtctcgggggttgtggcccccgccccctccctatatgcacccctggaaccagcaagtcccagacaaggagagcggaggaggaagtcatgggaacgcagcctccagttgtagcaggtttcactattcctatgctggggtacacagtgagagtactcacttttcacttgtcttgctcttagattgggccatggctttcatcctgtgtcccctgacctgtccaggtgagtgtgagggcagcactgggaagctggagtgctgcttgtgcctcccttcccagtgggctgtgttgactgctgctccccacccctaccgatggtcccaggaagcagggagagttggggaaggcaagattggaaagacaggaagaccaaggcctcggcagaactctctgtcttctctccacttctggtcccctgtggtgatgtgcctgtaatctttttctccacccaaaccccttcccacgacaaaaacaagactgcctccctctcttccgggagctggtgacagccttgggcctttcagtcccaaagcggccgatgggagtctccctccgactccagatatgaacagggcccaggcctggagcgtttgctgtgccaggaggcggcagctcttctgggcagagcctgtccccgccttccctcactcttcctcatcctgcttctcttttcctcgcagatgataaaaggaatctggcattctacacctggaccatttgattgttttattttggaattggtgtatatcatgaagccttgctgaactaagttttgtgtgtatatatttaaaaaaaaaatcagtgtttaaataaagacctatgtacttaatcctttaactctgcggatagcatttggtaggtagtgattaactgtgaataataaatacacaatgaattcttca

SEQ ID NO: 136 - DNA, 2200 bp, Homo sapiens
cccaagccagagcggcgcggcctggaagaggccagggcccgggggaggcggcggcagcggcggcggctggggcagcccgggcagcccgagccccgcagcctgggcctgtgctcggcgccatgagcggcggcgggccttcgggaggcggccctgggggctcgggcagggcgcggactagctcgttcgcggagcccggcggcggaggcggaggaggcggcggcggccccggaggctcggcctccggcccaggcggcaccggcggcggaaaggcatctgtcggggccatgggtgggggcgtcggggcctcgagctccgggggtggacccggcggcagcggcggaggaggcagcggaggccccggcgcaggcactagcttcccgccgcccggggtgaagctgggccgtgacagcgggaaggtgaccacagtcgtagccactctaggccaaggcccagagcgctcccaagaagtggcttacacggacatcaaagtgattggcaatggctcatttggggtcgtgtaccaggcacggctggcagagaccagggaactagtcgccatcaagaaggttctccaggacaagaggttcaagaaccgagagctgcagatcatgcgtaagctggaccactgcaatattgtgaggctgagatactttttctactccagtggcgagaagaaagacgagctttacctaaatctggtgctggaatatgtgcccgagacagtgtaccgggtggcccgccacttcaccaaggccaagttgaccatccctatcctctatgtcaaggtgtacatgtaccagctcttccgcagcttggcctacatccactcccagggcgtgtgtcaccgcgacatcaagccccagaacctgctggtggaccctgacactgctgtcctcaagctctgcgattttggcagtgcaaagcagttggtccgaggggagcccaatgtctcctacatctgttctcgctactaccgggccccagagctcatctttggagccactgattacacctcatccatcgatgtttggtcagctggctgtgtactggcagagctcctcttgggccagcccatcttccctggggacagtggggtggaccagctggtggagatcatcaaggtgctgggaacaccaacccgggaacaaatccgagagatgaaccccaactacacggagttcaagttccctcagattaaagctcacccctggacaaaggtgttcaaatctcgaacgccgccagaggccatcgcgctctgctctagcctgctggagtacaccccatcctcaaggctctccccactagaggcctgtgcgcacagcttctttgatgaactgcgatgtctgggaacccagctgcctaacaaccgcccacttccccctctcttcaacttcagtgctggtgaactctccatccaaccgtctctcaacgccattctcatccctcctcacttgaggtccccagcgggcactaccaccctcaccccgtcctcacaagctttaactgagactccgaccagctcagactggcagtcgaccgatgccacacctaccctcactaactcctcctgagggccccaccaagcacccttccacttccatctgggagccccaagaggggctgggaaggggggccatagcccatcaagctcctgccctggctgggcccctagactagagggcagaggtaaatgagtccctgtccccacctccagtccctccctcaccagcctcacccctgtggtgggctttttaagaggattttaactggttgtggggagggaagagaaggacagggtgttggggggatgaggacctcctacccccttggccccctcccctcccccagacctccacctcctccagaccccctcccctcctgtgtcccttgtaaatagaaccagcccagcccgtctcctcttcccttccctggcccccgggtgtaaatagattgttataatttttttcttaaagaaaacgtcgattcgcaccgtccaacctggccccgcccctcctacagctgtaactcccctcctgtcctctgcccccaaggtctactccctcctcaccccaccctggagggccaggggagtggagagagctcctgatgtcttagtttccacagtaaggtttgcctgtgtacagacctccgttcaataaattattggcatgaaaacctgaaaaaaaaaaaaaaaaaaaaa

SEQ ID NO: 137 - DNA, 1639 bp, Homo sapiens
atcatctatatgttaaatatccgtgccgatctgtcttgaaggagaaatatatcgcttgttttgttttttatagtatacaaaaggagtgaaaagccaagaggacgaagtctttttctttttcttctgtgggagaacttaatgctgcatttatcgttaacctaacaccccaacataaagacaaaaggaagaaaaggaggaaggaaggaaaaggtgattcgcgaagagagtgatcatgtcagggcggcccagaaccacctcctttgcggagagctgcaagccggtgcagcagccttcagcttttggcagcatgaaagttagcagagacaaggacggcagcaaggtgacaacagtggtggcaactcctgggcagggtccagacaggccacaagaagtcagctatacagacactaaagtgattggaaatggatcatttggtgtggtatatcaagccaaactttgtgattcaggagaactggtcgccatcaagaaagtattgcaggacaagagatttaagaatcgagagctccagatcatgagaaagctagatcactgtaacatagtccgattgcgttatttcttctactccagtggtgagaagaaagatgaggtctatcttaatctggtgctggactatgttccggaaacagtatacagagttgccagacactatagtcgagccaaacagacgctccctgtgatttatgtcaagttgtatatgtatcagctgttccgaagtttagcctatatccattcctttggaatctgccatcgggatattaaaccgcagaacctcttgttggatcctgatactgctgtattaaaactctgtgactttggaagtgcaaagcagctggtccgaggagaacccaatgtttcgtatatctgttctcggtactatagggcaccagagttgatctttggagccactgattatacctctagtatagatgtatggtctgctggctgtgtgttggctgagctgttactaggacaaccaatatttccaggggatagtggtgtggatcagttggtagaaataatcaaggtcctgggaactccaacaagggagcaaatcagagaaatgaacccaaactacacagaatttaaattccctcaaattaaggcacatccttggactaaggattcgtcaggaacaggacatttcacctcaggagtgcgggtcttccgaccccgaactccaccggaggcaattgcactgtgtagccgtctgctggagtatacaccaactgcccgactaacaccactggaagcttgtgcacattcattttttgatgaattacgggacccaaatgtcaaactaccaaatgggcgagacacacctgcactcttcaacttcaccactcaagaactgtcaagtaatccacctctggctaccatccttattcctcctcatgctcggattcaagcagctgcttcaacccccacaaatgccacagcagcgtcagatgctaatactggagaccgtggacagaccaataatgctgcttctgcatcagcttccaactccacctgaacagtcccgagcagccagctgcacaggaaaaaccaccagttacttgagtgtcactcagcaacactggtcacgtttggaaagaatattaaaaaaaaaaaaaaaaaa

SEQ ID NO: 138 - DNA, 2091 bp, Homo sapiens
gagcggagccgcgggcgggagggcggacggaccgactgacggtagggacgggaggcgagcaagatggcgcagacgcagggcacccggaggaaagtctgttactactacgacggggatgttggaaattactattatggacaaggccacccaatgaagcctcaccgaatccgcatgactcataatttgctgctcaactatggtctctaccgaaaaatggaaatctatcgccctcacaaagccaatgctgaggagatgaccaagtaccacagcgatgactacattaaattcttgcgctccatccgtccagataacatgtcggagtacagcaagcagatgcagagattcaacgttggtgaggactgtccagtattcgatggcctgtttgagttctgtcagttgtctactggtggttctgtggcaagtgctgtgaaacttaataagcagcagacggacatcgctgtgaattgggctgggggcctgcaccatgcaaagaagtccgaggcatctggcttctgttacgtcaatgatatcgtcttggccatcctggaactgctaaagtatcaccagagggtgctgtacattgacattgatattcaccatggtgacggcgtggaagaggccttctacaccacggaccgggtcatgactgtgtcctttcataagtatggagagtacttcccaggaactggggacctacgggatatcggggctggcaaaggcaagtattatgctgttaactacccgctccgagacgggattgatgacgagtcctatgaggccattttcaagccggtcatgtccaaagtaatggagatgttccagcctagtgcggtggtcttacagtgtggctcagactccctatctggggatcggttaggttgcttcaatctaactatcaaaggacacgccaagtgtgtggaatttgtcaagagctttaacctgcctatgctgatgctgggaggcggtggttacaccattcgtaacgttgcccggtgctggacatatgagacagctgtggccctggatacggagatccctaatgagcttccatacaatgactactttgaatactttggaccagatttcaagctccacatcagtccttccaatatgactaaccagaacacgaatgagtacctggagaagatcaaacagcgactgtttgagaaccttagaatgctgccgcacgcacctggggtccaaatgcaggcgattcctgaggacgccatccctgaggagagtggcgatgaggacgaagacgaccctgacaagcgcatctcgatctgctcctctgacaaacgaattgcctgtgaggaagagttctccgattctgaagaggagggagaggggggccgcaagaactcttccaacttcaaaaaagccaagagagtcaaaacagaggatgaaaaagagaaagacccagaggagaagaaagaagtcaccgaagaggagaaaaccaaggaggagaagccagaagccaaaggggtcaaggaggaggtcaagttggcctgaatggacctctccagctctggcttcctgctgagtccctcacgtttcttccccaacccctcagattttatattttctatttctctgtgtatttatataaaaatttattaaatataaatatccccagggacagaaaccaaggccccgagctcagggcagctgtgctgggtgagctcttccaggagccaccttgccacccattcttcccgttcttaactttgaaccataaagggtgccaggtctgggtgaaagggatacttttatgcaaccataagacaaactcctgaaatgccaagtgcctgcttagtagctttggaaaggtgcccttattgaacattctagaaggggtggctgggtcttcaaggatctcctgtttttttcaggctcctaaagtaacatcagccatttttagattggttctgttttcgtaccttcccactggcctcaagtgagccaagaaacactgcctgccctctgtctgtcttctcctaattctgcaggtggaggttgctagtctagtttcctttttgagatactattttcatttttgtgagcctctttgtaataaaatggtacatttct

SEQ ID NO: 139 - DNA, 3241 bp, Homo sapiens
cgtggccctgtggcagccgagccatggtttctaaactgagccagctgcagacggagctcctggcggccctgctcgagtcagggctgagcaaagaggcactgatccaggcactgggtgagccggggccctacctcctggctggagaaggccccctggacaagggggagtcctgcggcggcggtcgaggggagctggctgagctgcccaatgggctgggggagactcggggctccgaggacgagacggacgacgatggggaagacttcacgccacccatcctcaaagagctggagaacctcagccctgaggaggcggcccaccagaaagccgtggtggagacccttctgcaggaggacccgtggcgtgtggcgaagatggtcaagtcctacctgcagcagcacaacatcccacagcgggaggtggtcgataccactggcctcaaccagtcccacctgtcccaacacctcaacaagggcactcccatgaagacgcagaagcgggccgccctgtacacctggtacgtccgcaagcagcgagaggtggcgcagcagttcacccatgcagggcagggagggctgattgaagagcccacaggtgatgagctaccaaccaagaaggggcggaggaaccgtttcaagtggggcccagcatcccagcagatcctgttccaggcctatgagaggcagaagaaccctagcaaggaggagcgagagacgctagtggaggagtgcaatagggcggaatgcatccagagaggggtgtccccatcacaggcacaggggctgggctccaacctcgtcacggaggtgcgtgtctacaactggtttgccaaccggcgcaaagaagaagccttccggcacaagctggccatggacacgtacagcgggccccccccagggccaggcccgggacctgcgctgcccgctcacagctcccctggcctgcctccacctgccctctcccccagtaaggtccacggtgtgcgctatggacagcctgcgaccagtgagactgcagaagtaccctcaagcagcggcggtcccttagtgacagtgtctacacccctccaccaagtgtcccccacgggcctggagcccagccacagcctgctgagtacagaagccaagctggtctcagcagctgggggccccctcccccctgtcagcaccctgacagcactgcacagcttggagcagacatccccaggcctcaaccagcagccccagaacctcatcatggcctcacttcctggggtcatgaccatcgggcctggtgagcctgcctccctgggtcctacgttcaccaacacaggtgcctccaccctggtcatcggcctggcctccacgcaggcacagagtgtgccggtcatcaacagcatgggcagcagcctgaccaccctgcagcccgtccagttctcccagccgctgcacccctcctaccagcagccgctcatgccacctgtgcagagccatgtgacccagagccccttcatggccaccatggctcagctgcagagcccccacgccctctacagccacaagcccgaggtggcccagtacacccacacgggcctgctcccgcagactatgctcatcaccgacaccaccaacctgagcgccctggccagcctcacgcccaccaagcaggtcttcacctcagacactgaggcctccagtgagtccgggcttcacacgccggcatctcaggccaccaccctccacgtccccagccaggaccctgccagcatccagcacctgcagccggcccaccggctcagcgccagccccacagtgtcctccagcagcctggtgctgtaccagagctcagactccagcaatggccagagccacctgctgccatccaaccacagcgtcatcgagaccttcatctccacccagatggcctcttcctcccagtaaccacggcacctgggccctggggcctgtactgcctgcttggggggtgatgagggcagcagccagccctgcctggaggacctgagcctgccgagcaaccgtggcccttcctggacagctgtgcctcgctccccactctgctctgatgcatcagaaagggagggctctgaggcgccccaacccgtggaggctgctcggggtgcacaggagggggtcgtggagagctaggagcaaagcctgttcatggcagatgtaggagggactgtcgctgcttcgtgggatacagtcttcttacttggaactgaagggggcggcctatgacttgggcacccccagcctgggcctatggagagccctgggaccgctacaccactctggcagccacacttctcaggacacaggcctgtgtagctgtgacctgctgagctctgagaggccctggatcagcgtggccttgttctgtcaccaatgtacccaccgggccactccttcctgccccaactccttccagctagtgacccacatgccatttgtactgaccccatcacctactcacacaggcatttcctgggtggctactctgtgccagagcctggggctctaacgcctgagcccagggaggccgaagctaacagggaaggcaggcagggctctcctggcttcccatccccagcgattccctctcccaggccccatgacctccagctttcctgtatttgttcccaagagcatcatgcctctgaggccagcctggcctcctgcctctactgggaaggctacttcggggctgggaagtcgtccttactcctgtgggagcctcgcaacccgtgccaagtccaggtcctggtggggcagctcctctgtctcgagcgccctgcagaccctgcccttgtttggggcaggagtagctgagctcacaaggcagcaaggcccgagcagctgagcagggccggggaactggccaagctgaggtgcccaggagaagaaagaggtgaccccagggcacaggagctacctgtgtggacaggactaacactcagaagcctgggggcctggctggctgagggcagttcgcagccaccctgaggagtctgaggtcctgagcactgccaggagggacaaaggagcctgtgaacccaggacaagcatggtcccacatccctgggcctgctgctgagaacctggccttcagtgtaccgcgtctaccctgggattcaggaaaaggcctggggtgacccggcaccccctgcagcttgtagccagccggggcgagtggcacgtttatttaacttttagtaaagtcaaggagaaatgcggtggaaaaa

SEQ ID NO: 140 - DNA, 1061 bp, Homo sapiens
tgccctgcgcccgcaacccgagccgcacccgccgcggacggagcccatgcgcggggcgaaccgcgcgcccccgcccccgccccgccccggcctcggccccggccctggccccgggggcagtcgcgcctgtgaacggtggggcaggagaccctgtaggaggaccccgggccgcaggcccctgaggagcgatgacggaatataagctggtggtggtgggcgccggcggtgtgggcaagagtgcgctgaccatccagctgatccagaaccattttgtggacgaatacgaccccactatagaggattcctaccggaagcaggtggtcattgatggggagacgtgcctgttggacatcctggataccgccggccaggaggagtacagcgccatgcgggaccagtacatgcgcaccggggagggcttcctgtgtgtgtttgccatcaacaacaccaagtcttttgaggacatccaccagtacagggagcagatcaaacgggtgaaggactcggatgacgtgcccatggtgctggtggggaacaagtgtgacctggctgcacgcactgtggaatctcggcaggctcaggacctcgcccgaagctacggcatcccctacatcgagacctcggccaagacccggcagggagtggaggatgccttctacacgttggtgcgtgagatccggcagcacaagctgcggaagctgaaccctcctgatgagagtggccccggctgcatgagctgcaagtgtgtgctctcctgacgcagcacaagctcaggacatggaggtgccggatgcaggaaggaggtgcagacggaaggaggaggaaggaaggacggaagcaaggaaggaaggaagggctgctggagcccagtcaccccgggaccgtgggccgaggtgactgcagaccctcccagggaggctgtgcacagactgtcttgaacatcccaaatgccaccggaaccccagcccttagctcccctcccaggcctctgtgggcccttgtcgggcacagatgggatcacagtaaattattggatggtcttgaaaaaaaaaaaaaaaaaa

SEQ ID NO: 141 - DNA, 2567 bp, Homo sapiens
ctccggcgcagtgttgggactgtctgggtatcggaaagcaagcctacgttgctcactattacgtataatccttttcttttcaagatgcctgaggaagtgcaccatggagaggaggaggtggagacttttgcctttcaggcagaaattgcccaactcatgtccctcatcatcaataccttctattccaacaaggagattttccttcgggagttgatctctaatgcttctgatgccttggacaagattcgctatgagagcctgacagacccttcgaagttggacagtggtaaagagctgaaaattgacatcatccccaaccctcaggaacgtaccctgactttggtagacacaggcattggcatgaccaaagctgatctcataaataatttgggaaccattgccaagtctggtactaaagcattcatggaggctcttcaggctggtgcagacatctccatgattgggcagtttggtgttggcttttattctgcctacttggtggcagagaaagtggttgtgatcacaaagcacaacgatgatgaacagtatgcttgggagtcttctgctggaggttccttcactgtgcgtgctgaccatggtgagcccattggcaggggtaccaaagtgatcctccatcttaaagaagatcagacagagtacctagaagagaggcgggtcaaagaagtagtgaagaagcattctcagttcataggctatcccatcaccctttatttggagaaggaacgagagaaggaaattagtgatgatgaggcagaggaagagaaaggtgagaaagaagaggaagataaagatgatgaagaaaaacccaagatcgaagatgtgggttcagatgaggaggatgacagcggtaaggataagaagaagaaaactaagaagatcaaagagaaatacattgatcaggaagaactaaacaagaccaagcctatttggaccagaaaccctgatgacatcacccaagaggagtatggagaattctacaagagcctcactaatgactgggaagaccacttggcagtcaagcacttttctgtagaaggtcagttggaattcagggcattgctatttattcctcgtcgggctccctttgacctttttgagaacaagaagaaaaagaacaacatcaaactctatgtccgccgtgtgttcatcatggacagctgtgatgagttgataccagagtatctcaattttatccgtggtgtggttgactctgaggatctgcccctgaacatctcccgagaaatgctccagcagagcaaaatcttgaaagtcattcgcaaaaacattgttaagaagtgccttgagctcttctctgagctggcagaagacaaggagaattacaagaaattctatgaggcattctctaaaaatctcaagcttggaatccacgaagactccactaaccgccgccgcctgtctgagctgctgcgctatcatacctcccagtctggagatgagatgacatctctgtcagagtatgtttctcgcatgaaggagacacagaagtccatctattacatcactggtgagagcaaagagcaggtggccaactcagcttttgtggagcgagtgcggaaacggggcttcgaggtggtatatatgaccgagcccattgacgagtactgtgtgcagcagctcaaggaatttgatgggaagagcctggtctcagttaccaaggagggtctggagctgcctgaggatgaggaggagaagaagaagatggaagagagcaaggcaaagtttgagaacctctgcaagctcatgaaagaaatcttagataagaaggttgagaaggtgacaatctccaatagacttgtgtcttcaccttgctgcattgtgaccagcacctacggctggacagccaatatggagcggatcatgaaagcccaggcacttcgggacaactccaccatgggctatatgatggccaaaaagcacctggagatcaaccctgaccaccccattgtggagacgctgcggcagaaggctgaggccgacaagaatgataaggcagttaaggacctggtggtgctgctgtttgaaaccgccctgctatcttctggcttttcccttgaggatccccagacccactccaaccgcatctatcgcatgatcaagctaggtctaggtattgatgaagatgaagtggcagcagaggaacccaatgctgcagttcctgatgagatcccccctctcgagggcgatgaggatgcgtctcgcatggaagaagtcgattaggttaggagttcatagttggaaaacttgtgcccttgtatagtgtccccatgggctcccactgcagcctcgagtgcccctgtcccacctggctccccctgctggtgtctagtgtttttttccctctcctgtccttgtgttgaaggcagtaaactaagggtgtcaagccccattccctctctactcttgacagcaggattggatgttgtgtattgtggtttattttattttcttcattttgttctgaaattaaagtatgcaaaataaagaatatgccgttttaaaaaaaaaaaaaaaaaaaaaaaaaaaaa

SEQ ID NO: 142 - DNA, 3916 bp, Homo sapiens
gagcaggaagtgtttgaggaagtcgcgccgcgctgcccgcgttaagattcccgcattttaatgttttcaggggggtgtcatagccccgggtttggccgccccagccccgccttccccgccccggggagcccgccccctgccccgcgtccctgccgacagagttagcacgacatcagtatgagctggtcaccttccctgacaacgcagacatgtggggcctgggaaatgaaagagcgccttgggacagggggatttggaaatgtcatccgatggcacaatcaggaaacaggtgagcagattgccatcaagcagtgccggcaggagctcagcccccggaaccgagagcggtggtgcctggagatccagatcatgagaaggctgacccaccccaatgtggtggctgcccgagatgtccctgaggggatgcagaacttggcgcccaatgacctgcccctgctggccatggagtactgccaaggaggagatctccggaagtacctgaaccagtttgagaactgctgtggtctgcgggaaggtgccatcctcaccttgctgagtgacattgcctctgcgcttagataccttcatgaaaacagaatcatccatcgggatctaaagccagaaaacatcgtcctgcagcaaggagaacagaggttaatacacaaaattattgacctaggatatgccaaggagctggatcagggcagtctttgcacatcattcgtggggaccctgcagtacctggccccagagctactggagcagcagaagtacacagtgaccgtcgactactggagcttcggcaccctggcctttgagtgcatcacgggcttccggcccttcctccccaactggcagcccgtgcagtggcattcaaaagtgcggcagaagagtgaggtggacattgttgttagcgaagacttgaatggaacggtgaagttttcaagctctttaccctaccccaataatcttaacagtgtcctggctgagcgactggagaagtggctgcaactgatgctgatgtggcacccccgacagaggggcacggatcccacgtatgggcccaatggctgcttcaaggccctggatgacatcttaaacttaaagctggttcatatcttgaacatggtcacgggcaccatccacacctaccctgtgacagaggatgagagtctgcagagcttgaaggccagaatccaacaggacacgggcatcccagaggaggaccaggagctgctgcaggaagcgggcctggcgttgatccccgataagcctgccactcagtgtatttcagacggcaagttaaatgagggccacacattggacatggatcttgtttttctctttgacaacagtaaaatcacctatgagactcagatctccccacggccccaacctgaaagtgtcagctgtatccttcaagagcccaagaggaatctcgccttcttccagctgaggaaggtgtggggccaggtctggcacagcatccagaccctgaaggaagattgcaaccggctgcagcagggacagcgagccgccatgatgaatctcctccgaaacaacagctgcctctccaaaatgaagaattccatggcttccatgtctcagcagctcaaggccaagttggatttcttcaaaaccagcatccagattgacctggagaagtacagcgagcaaaccgagtttgggatcacatcagataaactgctgctggcctggagggaaatggagcaggctgtggagctctgtgggcgggagaacgaagtgaaactcctggtagaacggatgatggctctgcagaccgacattgtggacttacagaggagccccatgggccggaagcaggggggaacgctggacgacctagaggagcaagcaagggagctgtacaggagactaagggaaaaacctcgagaccagcgaactgagggtgacagtcaggaaatggtacggctgctgcttcaggcaattcagagcttcgagaagaaagtgcgagtgatctatacgcagctcagtaaaactgtggtttgcaagcagaaggcgctggaactgttgcccaaggtggaagaggtggtgagcttaatgaatgaggatgagaagactgttgtccggctgcaggagaagcggcagaaggagctctggaatctcctgaagattgcttgtagcaaggtccgtggtcctgtcagtggaagcccggatagcatgaatgcctctcgacttagccagcctgggcagctgatgtctcagccctccacggcctccaacagcttacctgagccagccaagaagagtgaagaactggtggctgaagcacataacctctgcaccctgctagaaaatgccatacaggacactgtgagggaacaagaccagagtttcacggccctagactggagctggttacagacggaagaagaagagcacagctgcctggagcaggcctcatgatgtggggggactcgaccccctgacatggggcagcccatagcaggccttgtgcagtggggggactcgaccccctgacatggggctgcctggagcaggccgcgtgacgtggggctgcctggccgcggctctcacatggtggttcctgctgcactgatggcccaggggtctctggtatccagatggagctctcgcttcctcagcagctgtgactttcacccaggacccaggacgcagccctccgtgggcactgccggcgccttgtctgcacactggaggtcctccattacagaggcccagcgcacatcgctggccccacaaacgttcaggggtacagccatggcagctccttcctctgccgtgagaaaagtgcttggagtacggtttgccacacacgtgactggacagtgtccaattcaaatctttcagggcagagtccgagcagcgcttggtgacagcctgtcctctcctgctctccaaaggccctgctccctgtcctctctcactttacagcttgtgtttcttctggattcagcttctcctaaacagacagtttaattatagttgcggcctggccccatcctcacttcctctttttatttcactgctgctaaaattgtgtttttacctactactttggtggttgtcctcttttcggcaaagttggagcgagtgccaagctctccatctgtggtcctttctgccaagagcgactcatagtaaccaggatgggagagcagctgccttattctgaatcccaaaaattacttgggggtgattgtcacagaggagggacagaaagggtatctgctgaccaccagcctgcctacccatgcccatgtctccattcctgctcaagcgtgtgtgctgggccggggagtccctgtctctcacagcatctagcagtattattaaatggattcattttaaaaatagctcctatattttgtaacatgtctcaaacactcatactgggttccacaatccactgttagaatacctatggttagggcttctgaactaaaataatggaaaattttaacaatttgtatagtgcctggatcattactagtgccataaccctgcttcttcaacatttcacagaacttctcttttatataaaggcaagagcacaaaatgagttcagatgatcacaaacaggtgagttttgttggagaagaaagttggagtaggagactttcacaagtggtttccatggagatagaatgaagcattctgtggtcaagtaagtttagggagctattcatgtttcacttgctttgtggagattcacactatgcactgggaaagtatctgaaaagtcttataataaagaaacaggcttaactttgtgtaagaacactgtttatcaatgtcatttggctatagaaacattttctcctgctgattgtgtgtgtgaaacatgtattaacattccaatgaactagcatttaataaagcacaattttgg

SEQ ID NO: 143 - DNA, 1771 bp, Homo sapiens
agcgccacgggcggggcggggccggcggcgggctgcgggcgcggccggacgggagttccccggagaaggatcctgcagcccgagtcccgtcctcaggcttccccaatccaggggactcggcgccgggacgctgctatggacgacattttcactcagtgccgggagggcaacgcagtcgccgttcgcctgtggctggacaacacggagaacgacctcaaccagggggacgatcatggcttctcccccttgcactgggcctgccgagagggccgctctgctgtggttgagatgttgatcatgcggggggcacggatcaatgtaatgaaccgtggggatgacacccccctgcatctggcagccagtcatggacaccgtgatattgtacagaagctattgcagtacaaggcagacatcaatgcagtgaatgaacacgggaatgtgcccctgcactatgcctgtttttggggccaagatcaagtggcagaggacctggtggcaaatggggcccttgtcagcatctgtaacaagtatggagagatgcctgtggacaaagccaaggcacccctgagagagcttctccgagagcgggcagagaagatgggccagaatctcaaccgtattccatacaaggacacattctggaaggggaccacccgcactcggccccgaaatggaaccctgaacaaacactctggcattgacttcaaacagcttaacttcctgacgaagctcaacgagaatcactctggagagctatggaagggccgctggcagggcaatgacattgtcgtgaaggtgctgaaggttcgagactggagtacaaggaagagcagggacttcaatgaagagtgtccccggctcaggattttctcgcatccaaatgtgctcccagtgctaggtgcctgccagtctccacctgctcctcatcctactctcatcacacactggatgccgtatggatccctctacaatgtactacatgaaggcaccaatttcgtcgtggaccagagccaggctgtgaagtttgctttggacatggcaaggggcatggccttcctacacacactagagcccctcatcccacgacatgcactcaatagccgtagtgtaatgattgatgaggacatgactgcccgaattagcatggctgatgtcaagttctctttccaatgtcctggtcgcatgtatgcacctgcctgggtagcccccgaagctctgcagaagaagcctgaagacacaaacagacgctcagcagacatgtggagttttgcagtgcttctgtgggaactggtgacacgggaggtaccctttgctgacctctccaatatggagattggaatgaaggtggcattggaaggccttcggcctaccatcccaccaggtatttcccctcatgtgtgtaagctcatgaagatctgcatgaatgaagaccctgcaaagcgacccaaatttgacatgattgtgcctatccttgagaagatgcaggacaagtaggactggaaggtccttgcctgaactccagaggtgtcgggacatggttgggggaatgcacctccccaaagcagcaggcctctggttgcctcccccgcctccagtcatggtactaccccagccatggggtccatccccttcccccatccctaccactgtggccccaagaggggcgggctcagagctttgtcacttgccacatggtgtctcccaacatgggagggatcagccccgcctgtcacaataaagtttattatgaaaaaaaaaaaaaaaaaaaaaa

SEQ ID NO: 144 - DNA, 3912 bp, Homo sapiens
ctgtgctctgtccccaaccttccacttcccctcaacgcgctgctcagggatgaccttcggcactgtgcttcttctgagtgtcctggcttcttatcatggattcaacctggatgtggaggagcctacgatcttccaggaggatgcaggcggctttgggcagagcgtggtgcagttcggtggatctcgactcgtggtgggagcacccctggaggtggtggcggccaaccagacgggacggctgtatgactgcgcagctgccaccggcatgtgccagcccatcccgctgcacatccgccctgaggccgtgaacatgtccttgggcctgaccctggcagcctccaccaacggctcccggctcctggcctgtggcccgaccctgcacagagtctgtggggagaactcatactcaaagggttcctgcctcctgctgggctcgcgctgggagatcatccagacagtccccgacgccacgccagagtgtccacatcaagagatggacatcgtcttcctgattgacggctctggaagcattgaccaaaatgactttaaccagatgaagggctttgtccaagctgtcatgggccagtttgagggcactgacaccctgtttgcactgatgcagtactcaaacctcctgaagatccacttcaccttcacccaattccggaccagcccgagccagcagagcctggtggatcccatcgtccaactgaaaggcctgacgttcacggccacgggcatcctgacagtggtgacacagctatttcatcataagaatggggcccgaaaaagtgccaagaagatcctcattgtcatcacagatgggcagaagtacaaagaccccctggaatacagtgatgtcatcccccaggcagagaaggctggcatcatccgctacgctatcggggtgggacacgctttccagggacccactgccaggcaggagctgaataccatcagctcagcgcctccgcaggaccacgtgttcaaggtggacaactttgcagcccttggcagcatccagaagcagctgcaggagaagatctatgcagttgagggaacccagtccagggcaagcagctccttccagcacgagatgtcccaagaaggcttcagcacagccctcacaatggatggcctcttcctgggggctgtggggagctttagctggtctggaggtgccttcctgtatcccccaaatatgagccccaccttcatcaacatgtctcaggagaatgtggacatgagggactcttacctgggttactccaccgagctagccctgtggaagggggtacagaacctggtcctgggggccccccgctaccagcataccgggaaggctgtcatcttcacccaggtgtccaggcaatggaggaagaaggccgaagtcacagggacgcagatcggctcctacttcggggcctccctctgctccgtggatgtggacagcgatggcagcaccgacctgatcctcattggggccccccattactatgagcagacccgagggggccaggtgtccgtgtgtcccttgcctagggggagggtgcagtggcagtgtgacgctgttctccgtggtgagcagggccacccctggggccgctttggggcagccctgacagtgttgggggatgtgaatgaggacaagctgatagacgtggccattggggccccgggagagcaggagaaccggggtgctgtctacctgtttcacggagcctcagaatccggcatcagcccctcccacagccagcggattgccagctcccagctctcccccaggctgcagtattttgggcaggcgctgagtgggggtcaggacctcacccaggatggactgatggacctggccgtgggggcccggggccaggtgctcctgctcaggagtctgccggtgctgaaagtgggggtggccatgagattcagccctgtggaggtggccaaggctgtgtaccggtgctgggaagagaagcccagtgccctggaagctggggacgccaccgtctgtctcaccatccagaaaagctcactggaccagctaggtgacatccaaagctctgtcaggtttgatctggcactggacccaggtcgtctgacttctcgtgccattttcaatgaaaccaagaaccccactttgactcgaagaaaaaccctgggactggggattcactgtgaaaccctgaagctgcttttgccagattgtgtggaggatgtggtgagccccatcattctgcacctcaacttctcactggtgagagagcccatcccctccccccagaacctgcgtcctgtgctggccgtgggctcacaagacctcttcactgcttctctccccttcgagaagaactgtgggcaagatggcctctgtgaaggggacctgggtgtcaccctcagcttctcaggcctgcagaccctgaccgtggggagctccctggagctcaacgtgattgtgactgtgtggaacgcaggtgaggattcctacggaaccgtggtcagcctctactatccagcagggctgtcgcaccgacgggtgtcaggagcccagaagcagccccatcagagtgccctgcgcctggcatgtgagacagtgcccactgaggatgagggcctaagaagcagccgctgcagtgtcaaccaccccatcttccatgagggctctaacggcaccttcatagtcacattcgatgtctcctacaaggccaccctgggagacaggatgcttatgagggccagtgcaagcagtgagaacaataaggcttcaagcagcaaggccaccttccagctggagctcccggtgaagtatgcagtctacaccatgatcagcaggcaggaagaatccaccaagtacttcaactttgcaacctccgatgagaagaaaatgaaagaggctgagcatcgataccgtgtgaataacctcagccagcgagatctggccatcagcattaacttctgggttcctgtcctgctgaacggggtggctgtgtgggatgtggtcatggaggccccatctcagagtctcccctgtgtttcagagagaaaacctccccagcattctgacttcctgacccagatttcaagaagtcccatgctggactgctccattgctgactgcctgcagttccgctgtgacgtcccctccttcagcgtccaggaggagctggatttcaccctgaagggcaatctcagtttcggctgggtccgcgagacattgcagaagaaggtgttggtcgtgagtgtggctgaaattacgttcgacacatccgtgtactcccagcttccaggacaggaggcatttatgagagctcagatggagatggtgctagaagaagacgaggtctacaatgccattcccatcatcatgggcagctctgtgggggctctgctactgctggcgctcatcacagccacactgtacaagcttggcttcttcaaacgccactacaaggaaatgctggaggacaagcctgaagacactgccacattcagtggggacgatttcagctgtgtggccccaaatgtgcctttgtcctaataatccactttcctgtttatctctaccactgtgggctggacttgcttgcaaccataaatcaacttacatggaaacaacttctgcatagatctgcactggcctaagcaacctaccaggtgctaagcaccttctcggagagatagagattgtaatgtttttacatatctgtccatctttttcagcaatgacccactttttacagaagcaggcatggtgccagcataaattttcatatgcttaagaattgtcacatgaaatgaggatgtttatagcacactttccttgcgtggaagagctataacccagggacctgagtgcctctctgggaatagtcgggggaacctatttgtgggcattgaaaaagttttttcactttc

SEQ ID NO: 145 - DNA, 5133 bp, Homo sapiens
cctctttcaccctgtctaggttgccagcaaatcccacgggcctcctgacgctgcccctggggccacaggtccctcgagtgctggaaggatgaaggattcctgcatcactgtgatggccatggcgctgctgtctgggttctttttcttcgcgccggcctcgagctacaacctggacgtgcggggcgcgcggagcttctccccaccgcgcgccgggaggcactttggataccgcgtcctgcaggtcggaaacggggtcatcgtgggagctccaggggaggggaacagcacaggaagcctctatcagtgccagtcgggcacaggacactgcctgccagtcaccctgagaggttccaactatacctccaagtacttgggaatgaccttggcaacagaccccacagatggaagcattttggcctgtgaccctgggctgtctcgaacgtgtgaccagaacacctatctgagtggcctgtgttacctcttccgccagaatctgcagggtcccatgctgcaggggcgccctggttttcaggaatgtatcaagggcaacgtagacctggtatttctgtttgatggttcgatgagcttgcagccagatgaatttcagaaaattctggacttcatgaaggatgtgatgaagaaactcagcaacacttcgtaccagtttgctgctgttcagttttccacaagctacaaaacagaatttgatttctcagattatgttaaatggaaggaccctgatgctctgctgaagcatgtaaagcacatgttgctgttgaccaatacctttggtgccatcaattatgtcgcgacagaggtgttccgggaggagctgggggcccggccagatgccaccaaagtgcttatcatcatcacggatggggaggccactgacagtggcaacatcgatgcggccaaagacatcatccgctacatcatcgggattggaaagcattttcagaccaaggagagtcaggagaccctccacaaatttgcatcaaaacccgcgagcgagtttgtgaaaattctggacacatttgagaagctgaaagatctattcactgagctgcagaagaagatctatgtcattgagggcacaagcaaacaggacctgacttccttcaacatggagctgtcctccagcggcatcagtgctgacctcagcaggggccatgcagtcgtgggggcagtaggagccaaggactgggctgggggctttcttgacctgaaggcagacctgcaggatgacacatttattgggaatgaaccattgacaccagaagtgagagcaggctatttgggttacaccgtgacctggctgccctcccggcaaaagacttcgttgctggcctcgggagcccctcgataccagcacatgggccgagtgctgctgttccaagagccacagggcggaggacactggagccaggtccagacaatccatgggacccagattggctcttatttcggtggggagctgtgtggcgtcgacgtggaccaagatggggagacagagctgctgctgattggtgccccactgttctatggggagcagagaggaggccgggtgtttatctaccagagaagacagttggggtttgaagaagtctcagagctgcagggggaccccggctacccactcgggcggtttggagaagccatcactgctctgacagacatcaacggcgatgggctggtagacgtggctgtgggggcccctctggaggagcagggggctgtgtacatcttcaatgggaggcacggggggcttagtccccagccaagtcagcggatagaagggacccaagtgctctcaggaattcagtggtttggacgctccatccatggggtgaaggaccttgaaggggatggcttggcagatgtggctgtgggggctgagagccagatgatcgtgctgagctcccggcccgtggtggatatggtcaccctgatgtccttctctccagctgagatcccagtgcatgaagtggagtgctcctattcaaccagtaacaagatgaaagaaggagttaatatcacaatctgtttccagatcaagtctctctacccccagttccaaggccgcctggttgccaatctcacttacactctgcagctggatggccaccggaccagaagacgggggttgttcccaggagggagacatgaactcagaaggaatatagctgtcaccaccagcatgtcatgcactgacttctcatttcatttcccggtatgtgttcaagacctcatctcccccatcaatgtttccctgaatttctctctttgggaggaggaagggacaccgagggaccaaagggcgcagggcaaggacataccgcccatcctgagaccctccctgcactcggaaacctgggagatcccttttgagaagaactgtggggaggacaagaagtgtgaggcaaacttgagagtgtccttctctcctgcaagatccagagccctgcgtctaactgcttttgccagcctctctgtggagctgagcctgagtaacttggaagaagatgcttactgggtccagctggacctgcacttccccccgggactctccttccgcaaggtggagatgctgaagccccatagccagatacctgtgagctgcgaggagcttcctgaagagtccaggcttctgtccagggcattatcttgcaatgtgagctctcccatcttcaaagcaggccactcggttgctctgcagatgatgtttaatacactggtaaacagctcctggggggactcggttgaattgcacgccaatgtgacctgtaacaatgaggactcagacctcctggaggacaactcagccactaccatcatccccatcctgtaccccatcaacatcctcatccaggaccaagaagactccacactctatgtcagtttcacccccaaaggccccaagatccaccaagtcaagcacatgtaccaggtgaggatccagccttccatccacgaccacaacatacccaccctggaggctgtggttggggtgccacagcctcccagcgaggggcccatcacacaccagtggagcgtgcagatggagcctcccgtgccctgccactatgaggatctggagaggctcccggatgcagctgagccttgtctccccggagccctgttccgctgccctgttgtcttcaggcaggagatcctcgtccaagtgatcgggactctggagctggtgggagagatcgaggcctcttccatgttcagcctctgcagctccctctccatctccttcaacagcagcaagcatttccacctctatggcagcaacgcctccctggcccaggttgtcatgaaggttgacgtggtgtatgagaagcagatgctctacctctacgtgctgagcggcatcggggggctgctgctgctgctgctcattttcatagtgctgtacaaggttggtttcttcaaacggaacctgaaggagaagatggaggctggcagaggtgtcccgaatggaatccctgcagaagactctgagcagctggcatctgggcaagaggctggggatcccggctgcctgaagcccctccatgagaaggactctgagagtggtggtggcaaggactgagtccaggcctgtgaggtgcagagtgcccagaactggactcaggatgcccagggccactctgcctctgcctgcattctgccgtgtgccctcgggcgagtcactgcctctccctggccctcagtttccctatctcgaacatggaactcattcctgaatgtctcctttgcaggctcatagggaagacctgctgagggaccagccaagagggctgcaaaagtgagggcttgtcattaccagacggttcaccagcctctcttggttccttccttggaagagaatgtctgatctaaatgtggagaaactgtagtctcaggacctagggatgttctggccctcacccctgccctgggatgtccacagatgcctccaccccccagaacctgtccttgcacactcccctgcactggagtccagtctcttctgctggcagaaagcaaatgtgacctgtgtcactacgtgactgtggcacacgccttgttcttggccaaagaccaaattccttggcatgccttccagcaccctgcaaaatgagaccctcgtggccttccccagcctcttctagagccgtgatgcctccctgttgaagctctggtgacaccagcctttctcccaggccaggctccttcctgtcttcctgcattcacccagacagctccctctgcctgaaccttccatctcgcccacccctccttccttgaccagcagatcccagctcacgtcacacacttggttgggtcctcacatctttcacacttccaccaccctgcactactccctcaaagcacacgtcatgtttcttcatccggcagcctggatgttttttccctgtttaatgattgacgtacttagcagctatctctcagtgaactgtgagggtaaaggctatacttgtcttgttcaccttgggatgacgccgcatgatatgtcagggcgtgggacatctagtaggtgcttgacataatttcactgaattaatgacagagccagtgggaagatacagaaaaagagggccggggctgggcgcggtggttcacgcctgtaatcccagcactttgggaggccaaggagggtggatcacctgaggtcaggagttagaggccagcctggcgaaaccccatctctactaaaaatacaaaatccaggcgtggtggcacacacctgtagtcccagctactcaggaggttgaggtaggagaattgcttgaacctgggaggtggaggttgcagtgagccaagattgcgccattgcactccagcctgggcaacacagcgagactccgtctcaaggaaaaaataaaaataaaaagcgggcacgggcccggacatccccacccttggaggctgtcttctcaggctctgccctgccctagctccacaccctctcccaggacccatcacgcctgtgcagtggcccccacagaaagactgagctcaaggtgggaaccacgtctgctaacttggagccccagtgccaagcacagtgcctgcatgtatttatccaataaatgtgaaattctgtccaaaaaaaaaaaa

SEQ ID NO: 146 - DNA, 4742 bp, Homo sapiens
ttttctgcccttctttgctttggtggcttccttgtggttcctcagtggtgcctgcaacccctggttcacctccttccaggttctggctccttccagccatggctctcagagtccttctgttaacagccttgaccttatgtcatgggttcaacttggacactgaaaacgcaatgaccttccaagagaacgcaaggggcttcgggcagagcgtggtccagcttcagggatccagggtggtggttggagccccccaggagatagtggctgccaaccaaaggggcagcctctaccagtgcgactacagcacaggctcatgcgagcccatccgcctgcaggtccccgtggaggccgtgaacatgtccctgggcctgtccctggcagccaccaccagcccccctcagctgctggcctgtggtcccaccgtgcaccagacttgcagtgagaacacgtatgtgaaagggctctgcttcctgtttggatccaacctacggcagcagccccagaagttcccagaggccctccgagggtgtcctcaagaggatagtgacattgccttcttgattgatggctctggtagcatcatcccacatgactttcggcggatgaaggagtttgtctcaactgtgatggagcaattaaaaaagtccaaaaccttgttctctttgatgcagtactctgaagaattccggattcactttaccttcaaagagttccagaacaaccctaacccaagatcactggtgaagccaataacgcagctgcttgggcggacacacacggccacgggcatccgcaaagtggtacgagagctgtttaacatcaccaacggagcccgaaagaatgcctttaagatcctagttgtcatcacggatggagaaaagtttggcgatcccttgggatatgaggatgtcatccctgaggcagacagagagggagtcattcgctacgtcattggggtgggagatgccttccgcagtgagaaatcccgccaagagcttaataccatcgcatccaagccgcctcgtgatcacgtgttccaggtgaataactttgaggctctgaagaccattcagaaccagcttcgggagaagatctttgcgatcgagggtactcagacaggaagtagcagctcctttgagcatgagatgtctcaggaaggcttcagcgctgccatcacctctaatggccccttgctgagcactgtggggagctatgactgggctggtggagtctttctatatacatcaaaggagaaaagcaccttcatcaacatgaccagagtggattcagacatgaatgatgcttacttgggttatgctgccgccatcatcttacggaaccgggtgcaaagcctggttctgggggcacctcgatatcagcacatcggcctggtagcgatgttcaggcagaacactggcatgtgggagtccaacgctaatgtcaagggcacccagatcggcgcctacttcggggcctccctctgctccgtggacgtggacagcaacggcagcaccgacctggtcctcatcggggccccccattactacgagcagacccgagggggccaggtgtccgtgtgccccttgcccagggggagggctcggtggcagtgtgatgctgttctctacggggagcagggccaaccctggggccgctttggggcagccctaacagtgctgggggacgtaaatggggacaagctgacggacgtggccattggggccccaggagaggaggacaaccggggtgctgtttacctgtttcacggaacctcaggatctggcatcagcccctcccatagccagcggatagcaggctccaagctctctcccaggctccagtattttggtcagtcactgagtgggggccaggacctcacaatggatggactggtagacctgactgtaggagcccaggggcacgtgctgctgctcaggtcccagccagtactgagagtcaaggcaatcatggagttcaatcccagggaagtggcaaggaatgtatttgagtgtaatgatcaggtggtgaaaggcaaggaagccggagaggtcagagtctgcctccatgtccagaagagcacacgggatcggctaagagaaggacagatccagagtgttgtgacttatgacctggctctggactccggccgcccacattcccgcgccgtcttcaatgagacaaagaacagcacacgcagacagacacaggtcttggggctgacccagacttgtgagaccctgaaactacagttgccgaattgcatcgaggacccagtgagccccattgtgctgcgcctgaacttctctctggtgggaacgccattgtctgctttcgggaacctccggccagtgctggcggaggatgctcagagactcttcacagccttgtttccctttgagaagaattgtggcaatgacaacatctgccaggatgacctcagcatcaccttcagtttcatgagcctggactgcctcgtggtgggtgggccccgggagttcaacgtgacagtgactgtgagaaatgatggtgaggactcctacaggacacaggtcaccttcttcttcccgcttgacctgtcctaccggaaggtgtccacgctccagaaccagcgctcacagcgatcctggcgcctggcctgtgagtctgcctcctccaccgaagtgtctggggccttgaagagcaccagctgcagcataaaccaccccatcttcccggaaaactcagaggtcacctttaatatcacgtttgatgtagactctaaggcttcccttggaaacaaactgctcctcaaggccaatgtgaccagtgagaacaacatgcccagaaccaacaaaaccgaattccaactggagctgccggtgaaatatgctgtctacatggtggtcaccagccatggggtctccactaaatatctcaacttcacggcctcagagaataccagtcgggtcatgcagcatcaatatcaggtcagcaacctggggcagaggagcctccccatcagcctggtgttcttggtgcccgtccggctgaaccagactgtcatatgggaccgcccccaggtcaccttctccgagaacctctcgagtacgtgccacaccaaggagcgcttgccctctcactccgactttctggctgagcttcggaaggcccccgtggtgaactgctccatcgctgtctgccagagaatccagtgtgacatcccgttctttggcatccaggaagaattcaatgctaccctcaaaggcaacctctcgtttgactggtacatcaagacctcgcataaccacctcctgatcgtgagcacagctgagatcttgtttaacgattccgtgttcaccctgctgccgggacagggggcgtttgtgaggtcccagacggagaccaaagtggagccgttcgaggtccccaaccccctgccgctcatcgtgggcagctctgtcgggggactgctgctcctggccctcatcaccgccgcgctgtacaagctcggcttcttcaagcggcaatacaaggacatgatgagtgaagggggtcccccgggggccgaaccccagtagcggctccttcccgacagagctgcctctcggtggccagcaggactctgcccagaccacacgtagcccccaggctgctggacacgtcggacagcgaagtatccccgacaggacgggcttgggcttccatttgtgtgtgtgcaagtgtgtatgtgcgtgtgtgcaagtgtctgtgtgcaagtgtgtgcacatgtgtgcgtgtgcgtgcatgtgcacttgcacgcccatgtgtgagtgtgtgcaagtatgtgagtgtgtccaagtgtgtgtgcgtgtgtccatgtgtgtgcaagtgtgtgcatgtgtgcgagtgtgtgcatgtgtgtgctcaggggcgtgtggctcacgtgtgtgactcagatgtctctggcgtgtgggtaggtgacggcagcgtagcctctccggcagaagggaactgcctgggctcccttgtgcgtgggtgaagccgctgctgggttttcctccgggagaggggacggtcaatcctgtgggtgaagacagagggaaacacagcagcttctctccactgaaagaagtgggacttcccgtcgcctgcgagcctgcggcctgctggagcctgcgcagcttggatggagactccatgagaagccgtgggtggaaccaggaacctcctccacaccagcgctgatgcccaataaagatgcccactgaggaatgatgaagcttcctttctggattcatttattatttcaatgtgactttaattttttggatggataagcttgtctatggtacaaaaatcacaaggcattcaagtgtacagtgaaaagtctccctttccagatattcaagtcacctccttaaaggtagtcaagattgtgttttgaggtttccttcagacagattccaggcgatgtgcaagtgtatgcacgtgtgcacacacaccacacatacacacacacaagcttttttacacaaatggtagcatactttatattggtctgtatcttgctttttttcaccaatatttctcagacatcggttcatattaagacataaattactttttcattcttttataccgctgcatagtattccattgtgtgagtgtaccataatgtatttaaccagtcttcttttgatatactattttcattctcttgttattgcatcaatgctgagttaataaatcaaatatatgtcatttttgcatatatgtaaggataa

SEQ ID NO: 147 - DNA, 4666 bp, Homo sapiens
agtaccttggtccagctcttcctgcaacggcccaggagctcagagctccacatctgaccttctagtcatgaccaggaccagggcagcactcctcctgttcacagccttagcaacttctctaggtttcaacttggacacagaggagctgacagccttccgtgtggacagcgctgggtttggagacagcgtggtccagtatgccaactcctgggtggtggttggagccccccaaaagataacagctgccaaccaaacgggtggcctctaccagtgtggctacagcactggtgcctgtgagcccatcggcctgcaggtgcccccggaggccgtgaacatgtccctgggcctgtccctggcgtctaccaccagcccttcccagctgctggcctgcggccccaccgtgcaccacgagtgcgggaggaacatgtacctcaccggactctgcttcctcctgggccccacccagctcacccagaggctcccggtgtccaggcaggagtgcccaagacaggagcaggacattgtgttcctgatcgatggctcaggcagcatctcctcccgcaactttgccacgatgatgaacttcgtgagagctgtgataagccagttccagagacccagcacccagttttccctgatgcagttctccaacaaattccaaacacacttcactttcgaggaattcaggcgcagctcaaaccccctcagcctgttggcttctgttcaccagctgcaagggtttacatacacggccaccgccatccaaaatgtcgtgcaccgattgttccatgcctcatatggggcccgtagggatgccgccaaaattctcattgtcatcactgatgggaagaaagaaggcgacagcctggattataaggatgtcatccccatggctgatgcagcaggcatcatccgctatgcaattggggttggattagcttttcaaaacagaaattcttggaaagaattaaatgacattgcatcgaagccctcccaggaacacatatttaaagtggaggactttgatgctctgaaagatattcaaaaccaactgaaggagaagatctttgccattgagggtacggagaccacaagcagtagctccttcgaattggagatggcacaggagggcttcagcgctgtgttcacacctgatggccccgttctgggggctgtggggagcttcacctggtctggaggtgccttcctgtaccccccaaatatgagccctaccttcatcaacatgtctcaggagaatgtggacatgagggactcttacctgggttactccaccgagctggccctctggaaaggggtgcagagcctggtcctgggggccccccgctaccagcacaccgggaaggctgtcatcttcacccaggtgtccaggcaatggaggatgaaggccgaagtcacggggactcagatcggctcctacttcggggcctccctctgctccgtggacgtagacagcgacggcagcaccgacctggtcctcatcggggccccccattactacgagcagacccgagggggccaggtgtctgtgtgtcccttgcccagggggtggagaaggtggtggtgtgatgctgttctctacggggagcagggccacccctggggtcgctttggggcggctctgacagtgctgggggatgtgaatggggacaagctgacagacgtggtcatcggggccccaggagaggaggagaaccggggtgctgtctacctgtttcacggagtcttgggacccagcatcagcccctcccacagccagcggatcgcgggctcccagctctcctccaggctgcagtattttgggcaggcactgagcgggggtcaagacctcacccaggatggactggtggacctggctgtgggggcccggggccaggtgctcctgctcaggaccagacctgtgctctgggtgggggtgagcatgcagttcatacctgccgagatccccaggtctgcgtttgagtgtcgggagcaggtggtctctgagcagaccctggtacagtccaacatctgcctttacattgacaaacgttctaagaacctgcttgggagccgtgacctccaaagctctgtgaccttggacctggccctcgaccctggccgcctgagtccccgtgccaccttccaggaaacaaagaaccggagtctgagccgagtccgagtcctcgggctgaaggcacactgtgaaaacttcaacctgctgctcccgagctgcgtggaggactctgtgacccccattaccttgcgtctgaacttcacgctggtgggcaagcccctccttgccttcagaaacctgcggcctatgctggccgccgatgctcagagatacttcacggcctccctaccctttgagaagaactgtggagccgaccatatctgccaggacaatctcggcatctccttcagcttcccaggcttgaagtccctgctggtggggagtaacctggagctgaacgcagaagtgatggtgtggaatgacggggaagactcctacggaaccaccatcaccttctcccaccccgcaggactgtcctaccgctacgtggcagagggccagaaacaagggcagctgcgttccctgcacctgacatgtgacagcgccccagttgggagccagggcacctggagcaccagctgcagaatcaaccacctcatcttccgtggcggcgcccagatcaccttcttggctacctttgacgtctcccccaaggctgtcctgggagaccggctgcttctgacagccaatgtgagcagtgagaacaacactcccaggaccagcaagaccaccttccagctggagctcccggtgaagtatgctgtctacactgtggttagcagccacgaacaattcaccaaatacctcaacttctcagagtctgaggagaaggaaagccatgtggccatgcacagataccaggtcaataacctgggacagagggacctgcctgtcagcatcaacttctgggtgcctgtggagctgaaccaggaggctgtgtggatggatgtggaggtctcccacccccagaacccatcccttcggtgctcctcagagaaaatcgcacccccagcatctgacttcctggcgcacattcagaagaatcccgtgctggactgctccattgctggctgcctgcggttccgctgtgacgtcccctccttcagcgtccaggaggagctggatttcaccctgaagggcaacctcagctttggctgggtccgccagatattgcagaagaaggtgtcggtcgtgagtgtggctgaaattacgttcgacacatccgtgtactcccagcttccaggacaggaggcatttatgagagctcagacgacaacggtgctggagaagtacaaggtccacaaccccacccccctcatcgtaggcagctccattgggggtctgttgctgctggcactcatcacagcggtactgtacaaagttggcttcttcaagcgtcagtacaaggaaatgatggaggaggcaaatggacaaattgccccagaaaacgggacacagacccccagcccgcccagtgagaaatgatcccctctttgccttggacttcttctcccccgcgagttttccccacttacttaccctcacctgtcaggcctgacggggaggaaccactgcaccaccgagagaggctgggatgggcctgcttcctgtctttgggagaaaacgtcttgcttgggaaggggcctttgtcttgtcaaggttccaactggaaacccttaggacagggtccctgctgtgttccccaaaggacttgacttgcaatttctacctagaaatacatggacaatacccccaggcctcagtctcccttctcccatgaggcacgaatgatctttctttcctttctttttttttttttttcttttcttttttttttttttgagacggagtctcgctctgtcacccaggctggagtgcaatggcgtgatctcggctcactgcaacctccgcctcccgggttcaagtaattctgctgtctcagcctcctgagtagctgggactacaggcacacgccacctcgcccggcccgatctttctaaaatacagttctgaatatgctgctcatccccacctgtcttcaacagctccccattaccctcaggacaatgtctgaactctccagcttcgcgtgagaagtccccttccatcccagagggtgggcttcagggcgcacagcatgagaggctctgtgcccccatcaccctcgtttccagtgaattagtgtcatgtcagcatcagctcagggcttcatcgtggggctctcagttccgatttcccaggctgaattgggagtgagatgcctgcatgctgggttctgcacagctggcctcccgcgttgggcaacattgctggctggaagggaggagcgccctctagggagggacatggccccggtgcggctgcagctcacccagccccaggggcagaagagacccaaccacttctattttttgaggctatgaatatagtacctgaaaaaatgccaagacatgattatttttttaaaaagcgtactttaaatgtttgtgttaataaattaaaacatgcacaaaaagatgcatctaccgctcttgggaaatatgtcaaaggtctaaaaataaaaaagccttctgtgaaaaaaaaaaaaaaaaa

SEQ ID NO: 148 - DNA, 2887 bp, Homo sapiens
ggagctgagaggaacaggaagtgtcaggactttacgacccgcgcctccagctgaggtttctagacgtgacccagggcagactggtagcaaagcccccacgcccagccaggagcaccgccgaggactccagcacaccgagggacatgctgggcctgcgccccccactgctcgccctggtggggctgctctccctcgggtgcgtcctctctcaggagtgcacgaagttcaaggtcagcagctgccgggaatgcatcgagtcggggcccggctgcacctggtgccagaagctgaacttcacagggccgggggatcctgactccattcgctgcgacacccggccacagctgctcatgaggggctgtgcggctgacgacatcatggaccccacaagcctcgctgaaacccaggaagaccacaatgggggccagaagcagctgtccccacaaaaagtgacgctttacctgcgaccaggccaggcagcagcgttcaacgtgaccttccggcgggccaagggctaccccatcgacctgtactatctgatggacctctcctactccatgcttgatgacctcaggaatgtcaagaagctaggtggcgacctgctccgggccctcaacgagatcaccgagtccggccgcattggcttcgggtccttcgtggacaagaccgtgctgccgttcgtgaacacgcaccctgataagctgcgaaacccatgccccaacaaggagaaagagtgccagcccccgtttgccttcaggcacgtgctgaagctgaccaacaactccaaccagtttcagaccgaggtcgggaagcagctgatttccggaaacctggatgcacccgagggtgggctggacgccatgatgcaggtcgccgcctgcccggaggaaatcggctggcgcaacgtcacgcggctgctggtgtttgccactgatgacggcttccatttcgcgggcgacgggaagctgggcgccatcctgacccccaacgacggccgctgtcacctggaggacaacttgtacaagaggagcaacgaattcgactacccatcggtgggccagctggcgcacaagctggctgaaaacaacatccagcccatcttcgcggtgaccagtaggatggtgaagacctacgagaaactcaccgagatcatccccaagtcagccgtgggggagctgtctgaggactccagcaatgtggtccaactcattaagaatgcttacaataaactctcctccagggtcttcctggatcacaacgccctccccgacaccctgaaagtcacctacgactccttctgcagcaatggagtgacgcacaggaaccagcccagaggtgactgtgatggcgtgcagatcaatgtcccgatcaccttccaggtgaaggtcacggccacagagtgcatccaggagcagtcgtttgtcatccgggcgctgggcttcacggacatagtgaccgtgcaggttcttccccagtgtgagtgccggtgccgggaccagagcagagaccgcagcctctgccatggcaagggcttcttggagtgcggcatctgcaggtgtgacactggctacattgggaaaaactgtgagtgccagacacagggccggagcagccaggagctggaaggaagctgccggaaggacaacaactccatcatctgctcagggctgggggactgtgtctgcgggcagtgcctgtgccacaccagcgacgtccccggcaagctgatatacgggcagtactgcgagtgtgacaccatcaactgtgagcgctacaacggccaggtctgcggcggcccggggagggggctctgcttctgcgggaagtgccgctgccacccgggctttgagggctcagcgtgccagtgcgagaggaccactgagggctgcctgaacccgcggcgtgttgagtgtagtggtcgtggccggtgccgctgcaacgtatgcgagtgccattcaggctaccagctgcctctgtgccaggagtgccccggctgcccctcaccctgtggcaagtacatctcctgcgccgagtgcctgaagttcgaaaagggcccctttgggaagaactgcagcgcggcgtgtccgggcctgcagctgtcgaacaaccccgtgaagggcaggacctgcaaggagagggactcagagggctgctgggtggcctacacgctggagcagcaggacgggatggaccgctacctcatctatgtggatgagagccgagagtgtgtggcaggccccaacatcgccgccatcgtcgggggcaccgtggcaggcatcgtgctgatcggcattctcctgctggtcatctggaaggctctgatccacctgagcgacctccgggagtacaggcgctttgagaaggagaagctcaagtcccagtggaacaatgataatccccttttcaagagcgccaccacgacggtcatgaaccccaagtttgctgagagttaggagcacttggtgaagacaaggccgtcaggacccaccatgtctgccccatcacgcggccgagacatggcttgccacagctcttgaggatgtcaccaattaaccagaaatccagttattttccgccctcaaaatgacagccatggccggccgggtgcttctgggggctcgtcggggggacagctccactctgactggcacagtctttgcatggagacttgaggagggagggcttgaggttggtgaggttaggtgcgtgtttcctgtgcaagtcaggacatcagtctgattaaaggtggtgccaatttatttacatttaaacttgtcagggtataaaatgacatcccattaattatattgttaatcaatcacgtgtatagaaaaaaaataaaacttcaatacaggctgtccatggaaaaaaaaaaaaaaaaaaaaaa

SEQ ID NO: 149 - DNA, 3338 bp, Homo sapiens
gacatcatgggctatttttaggggttgactggtagcagataagtgttgagctcgggctggataagggctcagagttgcactgagtgtggctgaagcagcgaggcgggagtggaggtgcgcggagtcaggcagacagacagacacagccagccagccaggtcggcagtatagtccgaactgcaaatcttattttcttttcaccttctctctaactgcccagagctagcgcctgtggctcccgggctggtgtttcgggagtgtccagagagcctggtctccagccgcccccgggaggagagccctgctgcccaggcgctgttgacagcggcggaaagcagcggtacccacgcgcccgccgggggaagtcggcgagcggctgcagcagcaaagaactttcccggctgggaggaccggagacaagtggcagagtcccggagcgaacttttgcaagcctttcctgcgtcttaggcttctccacggcggtaaagaccagaaggcggcggagagccacgcaagagaagaaggacgtgcgctcagcttcgctcgcaccggttgttgaacttgggcgagcgcgagccgcggctgccgggcgccccctccccctagcagcggaggaggggacaagtcgtcggagtccgggcggccaagacccgccgccggccggccactgcagggtccgcactgatccgctccgcggggagagccgctgctctgggaagtgagttcgcctgcggactccgaggaaccgctgcgcccgaagagcgctcagtgagtgaccgcgacttttcaaagccgggtagcgcgcgcgagtcgacaagtaagagtgcgggaggcatcttaattaaccctgcgctccctggagcgagctggtgaggagggcgcagcggggacgacagccagcgggtgcgtgcgctcttagagaaactttccctgtcaaaggctccggggggcgcgggtgtcccccgcttgccagagccctgttgcggccccgaaacttgtgcgcgcagcccaaactaacctcacgtgaagtgacggactgttctatgactgcaaagatggaaacgaccttctatgacgatgccctcaacgcctcgttcctcccgtccgagagcggaccttatggctacagtaaccccaagatcctgaaacagagcatgaccctgaacctggccgacccagtggggagcctgaagccgcacctccgcgccaagaactcggacctcctcacctcgcccgacgtggggctgctcaagctggcgtcgcccgagctggagcgcctgataatccagtccagcaacgggcacatcaccaccacgccgacccccacccagttcctgtgccccaagaacgtgacagatgagcaggagggcttcgccgagggcttcgtgcgcgccctggccgaactgcacagccagaacacgctgcccagcgtcacgtcggcggcgcagccggtcaacggggcaggcatggtggctcccgcggtagcctcggtggcagggggcagcggcagcggcggcttcagcgccagcctgcacagcgagccgccggtctacgcaaacctcagcaacttcaacccaggcgcgctgagcagcggcggcggggcgccctcctacggcgcggccggcctggcctttcccgcgcaaccccagcagcagcagcagccgccgcaccacctgccccagcagatgcccgtgcagcacccgcggctgcaggccctgaaggaggagcctcagacagtgcccgagatgcccggcgagacaccgcccctgtcccccatcgacatggagtcccaggagcggatcaaggcggagaggaagcgcatgaggaaccgcatcgctgcctccaagtgccgaaaaaggaagctggagagaatcgcccggctggaggaaaaagtgaaaaccttgaaagctcagaactcggagctggcgtccacggccaacatgctcagggaacaggtggcacagcttaaacagaaagtcatgaaccacgttaacagtgggtgccaactcatgctaacgcagcagttgcaaacattttgaagagagaccgtcgggggctgaggggcaacgaagaaaaaaaataacacagagagacagacttgagaacttgacaagttgcgacggagagaaaaaagaagtgtccgagaactaaagccaagggtatccaagttggactgggttgcgtcctgacggcgcccccagtgtgcacgagtgggaaggacttggcgcgccctcccttggcgtggagccagggagcggccgcctgcgggctgccccgctttgcggacgggctgtccccgcgcgaacggaacgttggacttttcgttaacattgaccaagaactgcatggacctaacattcgatctcattcagtattaaaggggggagggggagggggttacaaactgcaatagagactgtagattgcttctgtagtactccttaagaacacaaagcggggggagggttggggaggggcggcaggagggaggtttgtgagagcgaggctgagcctacagatgaactctttctggcctgccttcgttaactgtgtatgtacatatatatattttttaatttgatgaaagctgattactgtcaataaacagcttcatgcctttgtaagttatttcttgtttgtttgtttgggtatcctgcccagtgttgtttgtaaataagagatttggagcactctgagtttaccatttgtaataaagtatataatttttttatgttttgtttctgaaaattccagaaaggatatttaagaaaatacaataaactattggaaagtactcccctaacctcttttctgcatcatctgtagatactagctatctaggtggagttgaaagagttaagaatgtcgattaaaatcactctcagtgcttcttactattaagcagtaaaaactgttctctattagactttagaaataaatgtacctgatgtacctgatgctatggtcaggttatactcctcctcccccagctatctatatggaattgcttaccaaaggatagtgcgatgtttcaggaggctggaggaaggggggttgcagtggagagggacagcccactgagaagtcaaacatttcaaagtttggattgtatcaagtggcatgtgctgtgaccatttataatgttagtagaaattttacaataggtgcttattctcaaagcaggaattggtggcagattttacaaaagatgtatccttccaatttggaatcttctctttgacaattcctagataaaaagatggcctttgcttatgaatatttataacagcattcttgtcacaataaatgtattcaaataccaaaaaaaaaaaaaaaaa

SEQ ID NO: 150 - DNA, 5830 bp, Homo sapiens
actgagtcccgggaccccgggagagcggtcagtgtgtggtcgctgcgtttcctctgcctgcgccgggcatcacttgcgcgccgcagaaagtccgtctggcagcctggatatcctctcctaccggcacccgcagacgcccctgcagccgccggtcggcgcccgggctccctagccctgtgcgctcaactgtcctgcgctgcggggtgccgcgagttccacctccgcgcctccttctctagacaggcgctgggagaaagaaccggctcccgagttctgggcatttcgcccggctcgaggtgcaggatgcagagcaaggtgctgctggccgtcgccctgtggctctgcgtggagacccgggccgcctctgtgggtttgcctagtgtttctcttgatctgcccaggctcagcatacaaaaagacatacttacaattaaggctaatacaactcttcaaattacttgcaggggacagagggacttggactggctttggcccaataatcagagtggcagtgagcaaagggtggaggtgactgagtgcagcgatggcctcttctgtaagacactcacaattccaaaagtgatcggaaatgacactggagcctacaagtgcttctaccgggaaactgacttggcctcggtcatttatgtctatgttcaagattacagatctccatttattgcttctgttagtgaccaacatggagtcgtgtacattactgagaacaaaaacaaaactgtggtgattccatgtctcgggtccatttcaaatctcaacgtgtcactttgtgcaagatacccagaaaagagatttgttcctgatggtaacagaatttcctgggacagcaagaagggctttactattcccagctacatgatcagctatgctggcatggtcttctgtgaagcaaaaattaatgatgaaagttaccagtctattatgtacatagttgtcgttgtagggtataggatttatgatgtggttctgagtccgtctcatggaattgaactatctgttggagaaaagcttgtcttaaattgtacagcaagaactgaactaaatgtggggattgacttcaactgggaatacccttcttcgaagcatcagcataagaaacttgtaaaccgagacctaaaaacccagtctgggagtgagatgaagaaatttttgagcaccttaactatagatggtgtaacccggagtgaccaaggattgtacacctgtgcagcatccagtgggctgatgaccaagaagaacagcacatttgtcagggtccatgaaaaaccttttgttgcttttggaagtggcatggaatctctggtggaagccacggtgggggagcgtgtcagaatccctgcgaagtaccttggttacccacccccagaaataaaatggtataaaaatggaataccccttgagtccaatcacacaattaaagcggggcatgtactgacgattatggaagtgagtgaaagagacacaggaaattacactgtcatccttaccaatcccatttcaaaggagaagcagagccatgtggtctctctggttgtgtatgtcccaccccagattggtgagaaatctctaatctctcctgtggattcctaccagtacggcaccactcaaacgctgacatgtacggtctatgccattcctcccccgcatcacatccactggtattggcagttggaggaagagtgcgccaacgagcccagccaagctgtctcagtgacaaacccatacccttgtgaagaatggagaagtgtggaggacttccagggaggaaataaaattgaagttaataaaaatcaatttgctctaattgaaggaaaaaacaaaactgtaagtacccttgttatccaagcggcaaatgtgtcagctttgtacaaatgtgaagcggtcaacaaagtcgggagaggagagagggtgatctccttccacgtgaccaggggtcctgaaattactttgcaacctgacatgcagcccactgagcaggagagcgtgtctttgtggtgcactgcagacagatctacgtttgagaacctcacatggtacaagcttggcccacagcctctgccaatccatgtgggagagttgcccacacctgtttgcaagaacttggatactctttggaaattgaatgccaccatgttctctaatagcacaaatgacattttgatcatggagcttaagaatgcatccttgcaggaccaaggagactatgtctgccttgctcaagacaggaagaccaagaaaagacattgcgtggtcaggcagctcacagtcctagagcgtgtggcacccacgatcacaggaaacctggagaatcagacgacaagtattggggaaagcatcgaagtctcatgcacggcatctgggaatccccctccacagatcatgtggtttaaagataatgagacccttgtagaagactcaggcattgtattgaaggatgggaaccggaacctcactatccgcagagtgaggaaggaggacgaaggcctctacacctgccaggcatgcagtgttcttggctgtgcaaaagtggaggcatttttcataatagaaggtgcccaggaaaagacgaacttggaaatcattattctagtaggcacggcggtgattgccatgttcttctggctacttcttgtcatcatcctacggaccgttaagcgggccaatggaggggaactgaagacaggctacttgtccatcgtcatggatccagatgaactcccattggatgaacattgtgaacgactgccttatgatgccagcaaatgggaattccccagagaccggctgaagctaggtaagcctcttggccgtggtgcctttggccaagtgattgaagcagatgcctttggaattgacaagacagcaacttgcaggacagtagcagtcaaaatgttgaaagaaggagcaacacacagtgagcatcgagctctcatgtctgaactcaagatcctcattcatattggtcaccatctcaatgtggtcaaccttctaggtgcctgtaccaagccaggagggccactcatggtgattgtggaattctgcaaatttggaaacctgtccacttacctgaggagcaagagaaatgaatttgtcccctacaagaccaaaggggcacgattccgtcaagggaaagactacgttggagcaatccctgtggatctgaaacggcgcttggacagcatcaccagtagccagagctcagccagctctggatttgtggaggagaagtccctcagtgatgtagaagaagaggaagctcctgaagatctgtataaggacttcctgaccttggagcatctcatctgttacagcttccaagtggctaagggcatggagttcttggcatcgcgaaagtgtatccacagggacctggcggcacgaaatatcctcttatcggagaagaacgtggttaaaatctgtgactttggcttggcccgggatatttataaagatccagattatgtcagaaaaggagatgctcgcctccctttgaaatggatggccccagaaacaatttttgacagagtgtacacaatccagagtgacgtctggtcttttggtgttttgctgtgggaaatattttccttaggtgcttctccatatcctggggtaaagattgatgaagaattttgtaggcgattgaaagaaggaactagaatgagggcccctgattatactacaccagaaatgtaccagaccatgctggactgctggcacggggagcccagtcagagacccacgttttcagagttggtggaacatttgggaaatctcttgcaagctaatgctcagcaggatggcaaagactacattgttcttccgatatcagagactttgagcatggaagaggattctggactctctctgcctacctcacctgtttcctgtatggaggaggaggaagtatgtgaccccaaattccattatgacaacacagcaggaatcagtcagtatctgcagaacagtaagcgaaagagccggcctgtgagtgtaaaaacatttgaagatatcccgttagaagaaccagaagtaaaagtaatcccagatgacaaccagacggacagtggtatggttcttgcctcagaagagctgaaaactttggaagacagaaccaaattatctccatcttttggtggaatggtgcccagcaaaagcagggagtctgtggcatctgaaggctcaaaccagacaagcggctaccagtccggatatcactccgatgacacagacaccaccgtgtactccagtgaggaagcagaacttttaaagctgatagagattggagtgcaaaccggtagcacagcccagattctccagcctgactcggggaccacactgagctctcctcctgtttaaaaggaagcatccacaccccaactcccggacatcacatgagaggtctgctcagattttgaagtgttgttctttccaccagcaggaagtagccgcatttgattttcatttcgacaacagaaaaaggacctcggactgcagggagccagtcttctaggcatatcctggaagaggcttgtgacccaagaatgtgtctgtgtcttctcccagtgttgacctgatcctcttttttcattcatttaaaaagcattatcatgcccctgctgcgggtctcaccatgggtttagaacaaagagcttcaagcaatggccccatcctcaaagaagtagcagtacctggggagctgacacttctgtaaaactagaagataaaccaggcaacgtaagtgttcgaggtgttgaagatgggaaggatttgcagggctgagtctatccaagaggctttgtttaggacgtgggtcccaagccaagccttaagtgtggaattcggattgatagaaaggaagactaacgttaccttgctttggagagtactggagcctgcaaatgcattgtgtttgctctggtggaggtgggcatggggtctgttctgaaatgtaaagggttcagacggggtttctggttttagaaggttgcgtgttcttcgagttgggctaaagtagagttcgttgtgctgtttctgactcctaatgagagttccttccagaccgttagctgtctccttgccaagccccaggaagaaaatgatgcagctctggctccttgtctcccaggctgatcctttattcagaataccacaaagaaaggacattcagctcaaggctccctgccgtgttgaagagttctgactgcacaaaccagcttctggtttcttctggaatgaataccctcatatctgtcctgatgtgatatgtctgagactgaatgcgggaggttcaatgtgaagctgtgtgtggtgtcaaagtttcaggaaggattttacccttttgttcttccccctgtccccaacccactctcaccccgcaacccatcagtattttagttatttggcctctactccagtaaacctgattgggtttgttcactctctgaatgattattagccagacttcaaaattattttatagcccaaattataacatctattgtattatttagacttttaacatatagagctatttctactgatttttgcccttgttctgtcctttttttcaaaaaagaaaatgtgttttttgtttggtaccatagtgtgaaatgctgggaacaatgactataagacatgctatggcacatatatttatagtctgtttatgtagaaacaaatgtaatatattaaagccttatatataatgaactttgtactattcacattttgtatcagtattatgtagcataacaaaggtcataatgctttcagcaattgatgtcattttattaaagaacattgaaaaacttga

SEQ ID NO: 151 - DNA, 6115 bp, Homo sapiens
gcactgacggcccatggcgccgccagccgcccgcctcgccctgctctccgccgcggcgctcacgctggcggcccggcccgcgcctagccccggcctcggccccggacccgagtgtttcacagccaatggtgcggattataggggaacacagaactggacagcactacaaggcgggaagccatgtctgttttggaacgagactttccagcatccatacaacactctgaaataccccaacggggaggggggcctgggtgagcacaactattgcagaaatccagatggagacgtgagcccctggtgctatgtggcagagcacgaggatggtgtctactggaagtactgtgagatacctgcttgccagatgcctggaaaccttggctgctacaaggatcatggaaacccacctcctctaactggcaccagtaaaacgtccaacaaactcaccatacaaacttgcatcagtttttgtcggagtcagaggttcaagtttgctgggatggagtcaggctatgcttgcttctgtggaaacaatcctgattactggaagtacggggaggcagccagtaccgaatgcaacagcgtctgcttcggggatcacacccaaccctgtggtggcgatggcaggatcatcctctttgatactctcgtgggcgcctgcggtgggaactactcagccatgtcttctgtggtctattcccctgacttccccgacacctatgccacggggagggtctgctactggaccatccgggttccgggggcctcccacatccacttcagcttccccctatttgacatcagggactcggcggacatggtggagcttctggatggctacacccaccgtgtcctagcccgcttccacgggaggagccgcccacctctgtccttcaacgtctctctggacttcgtcatcttgtatttcttctctgatcgcatcaatcaggcccagggatttgctgttttataccaagccgtcaaggaagaactgccacaggagaggcccgctgtcaaccagacggtggccgaggtgatcacggagcaggccaacctcagtgtcagcgctgcccggtcctccaaagtcctctatgtcatcaccaccagccccagccacccacctcagactgtcccaggatggacagtctatggtctggcaactctcctcatcctcacagtcacagccattgtagcaaagatacttctgcacgtcacattcaaatcccatcgtgttcctgcttcaggggaccttagggattgtcatcaaccagggacttcgggggaaatctggagcattttttacaagccttccacttcaatttccatctttaagaagaaactcaagggtcagagtcaacaagatgaccgcaatccccttgtgagtgactaaaaaccccactgtgcctaggacttgaggtccctctttgagctcaaggctgccgtggtcaacctctcctgtggttcttctctgacagactcttcccctcctctccctctgcctcggcctcttcggggaaaccctcctcctacagactaggaagaggcaccctgctgccagggcaggcagagcctggattcctcctgcttcatcgattgcacttaggagagagactcaaagccctggggcccggccctctctgcatctctctctgatctagctagcagtgggggtgtcaggacagtgaggctgagatgacagaggtggtcatggctggcacagggctcaggtacattctagatggctgtcaggtggtgggtagctttagttacattgaatttttcttgcttctctatttttgtccacacacaaatcagtttctcctgatctttatgtcttggaacagggccagacagggagaactctcaggtactcttgggagttggtcccatacaagtgcggactcctggacattagcgaggtgtaaagagggcagtgtctgtgctgccccggcagctttgctctccagatgctggactagggtgggcctccttcagcctgggagggtctgagaataagatctagtgacccccatttatatcaaacctgataccttacacatgggcttctttctagattcttctttccatagctcatggagctgcagggaaagctttaagagctttggtcatataaaacatccattcagctgggcgcgatggctcatgcctgtaatcccagcactgtgggaggctgaggcgggcagatcacctgaggtcaggagttcgagaccagcctggccaacatggtgaaaccccgtctctactaaaaatataaaaattagtcaggcgtggtggcaggcgcctgtaatcccagctactcagaaggctgagacagaagaacagcttgaacccaggaggctgagattgcagtgagccgagatcgcaccactgcactccagcctgggtgacaagagtgagactctgtctcaaaaaaacaaaacacaaataaacaaaaaaaatccattcatttactcatgcaataaattctcctgcaagcttttatgggcactcagtaagtactcaggattggctttatcagccttgccactgagcagctcatggtcctatggaacctgagccaggcctcagtctctccatgattggctcagctaactctcagttcagagtggagagtatcaatcttgtgtttttgcccttaggcagcactatatgagacatggggcctgtggtccttccttctggtgtcccccgtgttaaaagataaaaaacaccccaagggccgggcgcggtggctcatgcctgtaatcccagcactttgggaggctgaggcgggtggatcacgaggtcaggtgatcgaaaccatcctggctaagatggtgaaaccccgtctctactaaaaatacaaaaaattagctgggtgtggtggtgggcgcctgtagtcccagctgctcgggaggctgaggcaggagaatggcgtgaacccgggaggcggagcttgcagtgagcagagatcacgccactgcactccagcctgggtgacagtgcaagactctgtctcaaaaaaaaaaaaaacactccaagggccatccgtgctctctgcccctcctgtggggaccaagtggggttaggaatggctcagtggggaaggagagcactcttgtccccagtcccttgccaccctgtcccttagatagggaggtgggctgcagagattggtgccagaagagggtgggtttgggaattggagctcctccaaggagctcctcctaagattgagtgctgcagctgtagtggctgctggttgggagagtaagtgccatcactaatttaaaagtccttgccatctggaatcaggctttgtcaacagcagctgagaaaagcagcctgtgcctctgctggccaggcctaggccctcgtcagagcgtgcctctccacaaggcacttgggcctgggtgattgttgcgcctctggctttggcgtttcctctttgcagcactttgcctacctcccccaagccctgagccactgcctgctggggctcctactgaggttctggaaacacctctgcacctgccgcccctgggaggaaagagggccacacaggaagtgtctgcagggagaggtggcactcggcagcctgagttcaggagaggtgcttggagcttcaggcagaggggccttcagaggagggaaacggagcaatgtgtcacaggcaggcaggggcaggactgccaccccaggccccgtgggaggcctgctgagggcacagagctgctcggtgcagccttcatgctttgatctggaaagagcagctgtccgcaggcctctgtctccaagaggcctgtcacacaggaggaccgctggaaacataccaacacgtgcagtctcccctccaagctattcatgctgtttgtggaatctctctcaaacataagtgtcaggtgtgtgtcgtcccaacgggtcctgtgctgtgaatagatccatgtgcagcacaaagggaatgtggcacgtggccccaggaagagttcacccggccagggggcagttgttcagttgcctggggctgacactgaccactggcctctggggtgtcctgcagcccaaatgcccaccttgccctcctcacatctcagtcaggggaggccatgcccaagccaatgtgctgtcacagcctgcagcgggggcagcacttcctcggagggcctgggaggtgctggggatgccccagcgcttctcttcctgcctcgccctggcatggcccagcgcctctaggatcaacttacgatccgtggagcagccccgggaaacccaaatctggctcaggacagcgtacgggcaggagggctgtaaatcatcccaggctaagcctccgtgggcactggctcctgccgcagcctggctatggactcagttagaaccaggtagaaagtcagcgacaccccacagaaggccactgcggctaggtaaacacctgagaaagaaactgctccagaagagatgacgtgggcttccaggagcatggaggaggtggcacttgaacttttaggaaactccttagatgagataaagtgggggttggaggtggcgaaaagagggtaaccctgggaaagtcagtcagaacccatggcagaagactgcaggagaggcaggggaggggcttcggggaccactgtggacagagctctgaaagcaccctggccaaagcccctcctgaggtgacagagcgtgggaggaggctgcactgggcctgcgtgccatcctcacccctgttccccgctggcgccaggccctgccttcttggtacctgtgccaacaggagagccctcaccagccgatcttgtcactctccgtggtgacagtgtcttggccagctgtggcccctagtttctagcagcgtttctcagtgtccttggcccttctgagaaggcaggcgggaggcacacggtgccctgttcttccccgtttgtccagttgcttgcaaagcagagaatgagtaggagtgaacccgagtgacttcacccgccctgtcccccacgtcaggacaggcttgaggcctctctgggcgtgagcgaggaaaccaggctgctctaacttctgaagagtgggctctggctcaagactccaatcggccagaagcccacagagatcaaagcactagcaagttcagctgtcctggccctcgggtagaacccacgggcgtgcctgggtgcggctccacccacatgccccactgtcagcccaggcaggagccttcctggccgggctcaggatctgcctgcagcccagccaggccatcacccagccccgatgcatcctggcactgcacgcttactcttcacaagcacttatacgcggatggcctccgagaccctgcctccctggtctgctgaggtcaggccaggtctcccacggagccgggcagctccacaccccaccacctggcaccgttaggtttcagatctcccgtgtggtgtttgatgtcggcttttgttcctaccttgggagtttggattgtttcctctggtgtctttgtttaccttcctcactgttctacctcctggccaggtctcagcttagcttccctggtgtggggtgtttttcaagccttccagccacagctgtctcccctcaggctggacggctccggggtgacagggcttcaccctctgcctgcagacccctggtgggcacatctcacaggcttccgtcttgctgagttgggtacggaggcagaagtggggtgtggaggaaagtcagagggaaatctgcttcagaaaggaagggtctttagacacaaagactggaggcccttccccgcccgcacgggagctgccatcgtgggtctcatgcacgtcaagaccttcccacatccaaactcagcttccagcagggattttgactttggatgacaaggctttatttgtaaatatgctcttaatatgcaactttgagaataaaatagaaacatcatgtattttaaaatataagatgaagtgtgacgcactgtatacaatttaatatatatttttagggttttgttatttaagaaaatggaatgtaatggtacttttacaaaagagaaaaaatgttatttttactttctggaaaaaataaatattctcattgttgtagaaagaaaaaaaaaaaaaaaaaa

SEQ ID NO: 152 - DNA, 2071 bp, Homo sapiens
gtagaggctgaggcaccgcccagagctcgctgagacagagactgagaacgcccccggccagattccccccggagagacccgggtagggacagggacagagagacgcctctaggggcagaggccctgggaggcaaagacccccaggagagatttacccaccccagacggaaagcgcggctcagagtcggacgaggggagactgtcagaggacaacgccccctaggtctcctgggagaccccgaagcgaccccgggggcagcccgggccgtgtccgggcgagggtgacctatccttggttgagagcgatggggacacaagccctgcagggcttcctctttctcctcttcctcccgctgctgcagccgcgtggggcctcggctgggagcctgcacagtccaggcctgtccgaatgcttccaggtgaatggggctgactaccgcggccaccagaaccgcactggcccgcgcggggcgggccgcccgtgcctcttctgggaccagacgcagcaacacagctacagcagcgccagcgacccccacggccgctgggggctgggcgcgcacaacttctgccgtaacccagacggtgacgtgcagccgtggtgctacgtggctgagacagaggagggcatctactggcgctactgcgacatcccctcctgtcacatgccaggctacctgggatgctttgtggactcaggggcacccccagccctcagcggccccagcggcacctccacgaagctcacggtccaggtgtgcctacgcttctgccgcatgaaggggtaccagctggcgggcgtggaggccggttacgcctgcttctgtggctctgaaagcgacctggcccggggacgcctggcccccgccaccgactgtgaccagatctgtttcggccaccctggacagctgtgtggcggcgatgggcggctgggcgtctatgaagtgtcggtgggctcctgccaggggaactggacagcgcctcagggcgtcatctactccccggacttcccggacgagtacgggccggaccggaactgcagctgggccctgggcccgccaggcgccgcgctggagctcaccttccgcctcttcgagctggccgacccgcgcgaccggctggagctgcgcgacgcggcttcgggcagcctgctccgcgccttcgatggcgcccgcccaccgccgtccgggccgctgcgcctgggcactgccgcgctgctgctcaccttccgaagcgacgcgcgcggccacgcgcaaggcttcgcgctcacctaccgcgggctgcaggacgccgctgaggacccagaggcccccgagggctcggcccagacccccgcggcgcccctcgacggggccaacgtgagctgcagccccaggcctggggctccgccggccgcgattggggcccgggtcttctcgacggtgacggctgtctcggtgctgctgctgctgctcctggggctgctgcgtccgctgcgccgacggagctgtctgctggctccgggaaaagggcccccggcgctgggggcttccaggggccccaggagaagctgggctgtgtggtaccaacagccccgaggggtggccttgccctgctcccccggggacccccaggctgagggttctgccgcgggctaccggcctctgagtgcctccagccagagctccctgcgctcgctcatctccgctctctgactctgggccccgagggtccgctgggcccgccgccggcgagatggacacctgagatgctgtgctgcgccctgcctcggccttgcgcctgtgtaggggcagctcggcctctggtcgccttggggagaccaaaagtcggacaggaaacatctggtgctattatctgggacttggcctgaccgtgggggtccagatggtccaggccctctccatggacctgtatgtgggggtggtctctggtttcggaggtctttgaacccctctgggggtggtcctggactgccgtcctcagtgagaggtcacaggtcagcaaaaacagtcaaaaaacccccacagattttgaataaaggatctactttggtaaaaaaaaaaaaaaaaaa

SEQ ID NO: 153 - DNA, 9530 bp, Homo sapiens
cggggccagggcagcgcggactcgcgtcccgtggagcgttccaggcgggcgcgcggctttctccccagacccaccgagtggcggcggaggcgagatgcgcgggggcgtgctcctggtcttgctgctgtgtgtcgccgcgcagtgccggcagagaggcctgtttcctgccattctcaatcttgccagcaatgctcacatcagcaccaatgccacctgtggcgagaaggggccggagatgttctgcaaacttgtggagcatgtgccaggtcggcccgtccgaaacccacagtgccggatctgtgatggcaacagcgcaaaccccagagaacgccatccaatatcacatgccatagatggcaccaataactggtggcaaagtcccagcattcagaatgggagagaatatcactgggtcacaatcactctggacttaagacaggtctttcaagttgcatatgtcatcattaaagctgccaatgcccctcgacctggaaactggattttggagcgttctctggatggcaccacgttcagcccctggcagtattatgcagtcagcgactcagagtgtttgtctcgttacaatataactccaagacgagggccacccacctacagggctgatgatgaagtgatctgcacctcctattattccagattggtgccacttgagcatggagagattcatacatcactcatcaatggcagaccaagcgctgacgatctttcacccaagttgttggaattcacttctgcacgatatattcgccttcgcttgcaacgcattagaacgctcaatgcagatctcatgacccttagccaccgggaacctaaagaactggatcctattgttaccagacgctattattattcaataaaggacatttctgttggaggcatgtgtatctgctatggccatgctagtagctgcccatgggatgaaactacaaagaaactgcagtgtcaatgtgagcataatacttgcggggagagctgtaacaggtgctgtcctgggtaccatcagcagccctggaggccgggaaccgtgtcctccggcaatacatgtgaagcatgtaattgtcacaataaagccaaagactgttactatgatgaaagtgttgcaaagcagaagaaaagtttgaatactgctggacagttcagaggaggaggggtttgcataaattgcttgcagaacaccatgggaatcaactgtgaaacctgtattgatggatattatagaccacacaaagtgtctccttatgaggatgagccttgccgcccctgtaattgtgaccctgtggggtccctcagttctgtctgtattaaggatgacctccattctgacttacacaatgggaagcagccaggtcagtgcccatgtaaggaaggttatacaggagaaaaatgtgatcgctgccaacttggctataaggattacccgacctgtgtctcctgtgggtgcaacccagtgggcagtgccagtgatgagccctgcacagggccctgtgtttgtaaggaaaacgttgaggggaaggcctgtgatcgctgcaagccaggattctataacttgaaggaaaaaaacccccggggctgctccgagtgcttctgctttggcgtttctgatgtctgcagcagcctctcttggcctgttggtcaggtaaacagtatgtccgggtggctggtcaccgacttgatcagtcccaggaagatcccgtctcagcaagatgcactaggcgggcgccatcaggtcagcatcaacaacaccgcggtcatgcagagactggctcccaagtactactgggcagcccccgaggcctaccttggaaataagctgactgcgtttggcggattcctgaaatacacggtgtcctacgatattccggtagagacggtagacagtaacctcatgtcgcatgctgacgtcatcattaagggaaacggactcactttaagcacacaggctgagggtctgtcattgcagccttatgaagagtacctaaacgtggttagacttgtgcctgaaaacttccaagattttcacagcaaaaggcagattgatcgtgaccagctgatgactgtccttgccaatgtgacacatcttttgatcagagccaactacaattctgcaaaaatggctctttacaggttggagtccgtctctctggacatagccagctctaatgccatcgacctggtggtggccgctgatgtggagcactgtgaatgtccgcaaggctacacagggacctcctgtgagtcgtgcctctctggctattaccgcgtggatggaatactctttggaggaatttgtcaaccctgtgaatgccacggccatgcagctgagtgtaatgttcacggcgtttgcattgcgtgtgcgcacaacaccaccggcgtccactgtgagcagtgcttgcccggcttctacggggagccttcccgagggacacctggggactgccagccctgcgcctgccctctcaccatagcctccaacaatttcagccccacctgccacctcaatgatggagatgaagtggtctgtgactggtgtgccccgggctactcaggagcttggtgtgagagatgtgcagatggttactatggaaacccaacagtgcctggcgaatcttgtgttccctgtgactgcagcggcaacgtggacccctcggaggctggtcactgtgactcagtcaccggggagtgcctgaagtgcctggggaacacagatggcgcccactgtgaaaggtgtgctgacgggttctatggggacgctgtgacagccaagaactgccgcgcctgtgaatgccatgtgaaaggctcccattctgccgtgtgccatcttgagaccgggctctgtgactgcaaaccaaacgtgactggacagcagtgtgaccagtgcttgcatggctattatgggctggactcaggccatggctgccggccctgcaactgcagcgtggcaggctccgtgtcagatggctgcacggatgaaggccagtgtcactgtgtcccaggtgtggcagggaaaaggtgtgacaggtgtgcccatggcttctacgcctaccaggatggtagctgtacaccctgtgactgcccacacactcagaatacctgcgacccagaaactggagagtgtgtctgcccccctcacacacagggtgtgaagtgtgaagaatgtgaggatgggcactggggctacgatgcggaggtggggtgccaggcctgcaattgcagtctcgtggggtcgactcatcatcggtgcgatgtggtcaccggccattgccagtgcaagtcaaaatttggtggccgggcctgcgatcagtgttccttgggttacagagactttcccgactgtgttccctgtgactgtgacctgagggggacgtcgggggacgcctgcaacctggagcagggtctctgcggctgtgtggaggaaaccggggcctgcccttgcaaggaaaatgtctttggtcctcagtgcaacgaatgtcgagagggcaccttcgctctccgcgcagacaaccccctgggctgcagcccgtgcttctgctccgggctgtcccacctctgctcagagctggaggactacgtgaggaccccagtaacgctgggctccgatcagcctcttctgcgtgtggtttctcagagtaacttgaggggcacgaccgagggggtttactaccaggcccccgacttcctgctggatgccgccaccgtccggcagcacatccgtgcagagccgttttactggcggctgccgcagcagttccaaggagaccagctcatggcctatggtggcaaactgaagtacagcgtggccttctattctttggatggcgtcggcacctccaattttgagcctcaagttctcatcaaaggtggtcggatcagaaagcaagtcatttacatggatgcaccagccccagagaatggagtgagacaggaacaagaagtagcaatgagagagaatttttggaaatattttaactctgtttctgaaaaacctgtcacgcgagaggattttatgtctgtcctcagcgatattgagtacatcctcatcaaggcatcgtatggtcaaggattacagcagagcagaatctcagacatttcaatggaggttggcagaaaggctgaaaagctgcacccagaagaagaggttgcatctcttttagagaattgtgtctgtcctcctggcactgtgggattctcatgtcaggactgcgcccctgggtaccacagagggaagctcccagcagggagtgacaggggaccacgccctctggttgctccttgtgttccctgcagttgcaacaaccacagtgacacctgtgaccccaacaccgggaagtgtctgaactgtggcgataacacagcaggtgaccattgtgatgtgtgtacttctggctactacgggaaggtgactggctcagcaagtgactgtgctctgtgtgcctgtcctcacagccctcctgccagttttagtcccacttgtgtcttggaaggggaccacgatttccgttgtgacgcctgtctcctgggctatgaaggaaaacactgtgaaaggtgctcctcaagctattatgggaaccctcaaacaccaggtggcagttgccagaagtgtgactgcaacccgcacggctctgtccacggtgactgtgaccgcacatctgggcagtgcgtttgcaggctgggggcctcggggctccggtgcgatgagtgtgaaccgaggcacattctgatggaaacagattgtgtttcctgtgatgatgagtgtgtaggtgtgctgctgaatgacttggatgagattggtgatgccgttctttctctgaacctcactggcattatccctgtcccatatggaattttgtcaaacctggaaaatacaactaaatatctccaggaatctttattaaaagaaaatatgcaaaaggacctgggaaaaattaagcttgaaggtgttgcagaagaaacggacaacctgcaaaagaagctcactaggatgttagcgagtacccaaaaggtgaatagggcaactgagagaatcttcaaggagagtcaagacctggccatagccattgagaggctgcagatgagcatcacagaaattatggaaaagacaactttaaatcagactttggatgaagatttcctactacccaattctactcttcagaacatgcaacagaatggtacatctttgctagaaatcatgcagataagagacttcacacagttgcaccaaaatgccacccttgaactcaaggctgctgaagatttattgtcacaaattcaggaaaattaccagaagccgctggaagaattggaggtattgaaagaagcagcaagccacgtcctttcaaagcacaacaatgaactaaaggcggctgaggcgctcgtgagggaagctgaggcaaagatgcaggaaagcaaccacctgctgctcatggtcaatgctaatctgagagaattcagtgataaaaagctgcatgttcaagaagaacaaaatctgacctcagagctcattgtccaaggaagaggattgatagatgctgctgctgcacaaacagatgctgtacaagatgctctagagcacttagaggatcaccaggataagctacttttatggtctgccaaaatcaggcaccacatagatgacctggtcatgcacatgtcccaaaggaacgcagtcgacctggtctacagagctgaggaccatgccgctgagttccagagactagcagatgttctgtacagtggccttgaaaacatcagaaatgtgtccctgaatgccaccagtgcagcctatgtccattacaacatccagagcctgattgaagaatcggaggaactggccagagatgctcacaggactgtgactgagacgagcctgctctcagaatcccttgtttctaacgggaaagcggccgtgcagcgcagctccagatttctaaaagaaggcaacaacctcagcaggaagcttccaggtattgcattggaactgagtgaattgagaaataagacaaacagatttcaagagaatgctgttgaaattaccaggcaaaccaatgaatcactcttgatacttagagcaattcctaaaggtataagagacaagggagccaaaaccaaagagctggccacgtctgcaagccagagcgcggtgagcacgctgagggacgtggcggggctgagccaggagctgctgaacacatctgccagcctgtccagggtcaacaccacattacgagagacacaccagcttctgcaggactccaccatggccactctgttggctggaagaaaagtcaaagacgtggaaattcaagccaaccttttgtttgatcggttgaagcctttgaagatgttagaggagaatctgagcagaaacctatcagaaattaaactgttgatcagccaggcccgcaaacaagcagcttctattaaagtcgccgtgtctgcagacagagattgcatccgggcctaccagcctcagatttcctctaccaactacaataccttaacactaaatgttaagacacaggaacccgataatcttctcttctacctcggtagcagcaccgcttctgatttccttgcagtggagatgcggcgagggagagtggccttcctgtgggacctgggctccgggtccacacgcttggagtttccagactttcccattgatgacaacagatggcacagtatccatgtagccagatttggaaacattggttcactgagtgtaaaggaaatgagctcaaatcaaaagtcaccaacaaaaacaagtaaatcccctgggacagctaatgttctggatgtaaacaattcaacactcatgtttgttggaggtcttggaggacaaatcaagaaatctcctgctgtgaaggttactcattttaaaggctgcttgggggaggccttcctgaatggaaaatccataggcctatggaactatattgaaagggaaggcaagtgccgtgggtgcttcggaagctcccagaatgaagacccttccttccattttgacgggagtgggtactctgtcgtggagaagtcacttccggctaccgtgacccagataatcatgctttttaataccttttcacctaatggacttcttctctacctgggttcatacggcacaaaagactttttatccatcgagctgtttcgtggcagagtgaaggttatgactgacctgggttcaggacccattacccttttgacagacagacgttataacaatggaacctggtacaaaattgccttccagcgaaaccggaagcaaggagtgctagcagttatcgatgcctataacaccagtaataaagaaaccaagcagggcgagactccgggagcatcttctgacctcaaccgcctagacaaggacccgatttatgtgggtggattaccaaggtcaagagttgtaaggagaggtgtcaccaccaaaagctttgtgggctgcatcaagaacctggaaatatccagatcaacctttgacttactcagaaattcctatggagtgagaaaaggctgtttactggagcccatccggagtgttagcttcctgaaaggcggctacattgaattgccacccaaatctttgtcaccagaatcagaatggctggtaacatttgccaccacgaacagcagtggcatcatcctggctgccctcggcggggatgtggagaagcggggtgatcgtgaggaagcacacgtgcccttcttttccgtcatgctgatcggaggcaacattgaggtacatgtcaatcctggggatgggacaggcctgagaaaagctctcctgcacgctcccacgggtacctgcagtgatggacaagcgcattccatctccttggtcaggaatcggagaattatcactgtccaattggatgagaacaatcctgtggaaatgaagttgggcacattagtagaaagcaggacgataaatgtgtccaatctgtacgtcgggggaattccagagggagaggggacgtcactgctcacaatgagaagatcgttccatggctgtatcaaaaacctgatcttcaatttggaacttttggatttcaacagtgcagttggccatgagcaagtcgacctggacacctgctggctgtcagaaaggcctaagctggctcccgatgcagaggacagcaagctcttgccagagccccgggcttttccagaacagtgtgtggtggatgcagctctggagtacgttcccggcgctcaccagtttggtctcacacaaaacagccatttcatcttgccttttaatcagtcggctgtcagaaagaagctctcggttgagctaagcatccgcacgttcgcctccagcggcctgatttactacatggctcatcagaaccaagcagactacgctgtgctccagctgcacgggggccgcctccacttcatgtttgaccttggcaaaggcagaacaaaggtctctcaccctgcactgctcagtgatggcaagtggcacacggtcaagacagactatgttaaaagaaaaggcttcataactgtcgacggccgagagtctcccatggtgactgtggtgggagatggaaccatgctggatgtggagggtttgttctacctaggaggcctgccctcccagtaccaggccaggaaaattggaaatatcacccacagcatccctgcctgcattggggatgtgacggttaacagcaaacagctggacaaggacagcccggtgtctgccttcacggtgaacaggtgctacgcagtggcccaggaaggaacatactttgacggaagcggatatgcagctcttgtcaaagagggctacaaagtccagtcagatgtgaacatcacactggagtttcgaacctcctcgcagaatggcgtcctcctggggatcagcactgccaaagtggatgccattggactagagcttgtggacggcaaggtcttgttccatgtcaacaatggtgctggcaggataacagctgcatatgagcccaaaaccgccactgtgctctgtgatggaaaatggcacactcttcaagctaacaaaagcaaacaccgtatcactctgattgttgacgggaacgcagttggcgctgaaagtccacacacccagtctacctcagtggacaccaacaatcccatttatgttggtggctatcctgctggtgtgaagcaaaaatgcctgcgcagccagacctcgttccgcgggtgtttgaggaagctagctctgattaagagcccgcaggtgcagtcctttgacttcagcagagcgttcgaactgcacggagttttccttcattcctgtcctgggaccgagtcctgaacttcaagcagaatcctcagttggaatcattgctaatattttgaggagaagtgtatgtgtgaattaagaatctcttcagttcatatttcatttccaactcaggttaagtgtttctggggagagatgttgtgtttacgttacactaaaaccacatgtgcaacaaatacctccattaaatggtctaaaatgtaaaaaaaaaaaaaaaaaa

SEQ ID NO: 154 - DNA, 5831 bp, Homo sapiens
gggacctggaagcgccccagccccgcagcgatcgcagattcggctttcaaacaaaagaggcgccccggggggtgggaccgggacctcacccggtcctcgcagagttgcggccgcccgccccttcagccccggctctccgtatgcgcatgagcagaggcgcctccctctgttcctcccaaggctaaactttctaattcccttctttgggctcgggggctcccggagcagggcgagagctcgcgtcgccggaaaggaagacgggaagaaagggcaggcggctcggcgggcgtcttctccactcctctgccgcgtccccgtggctgcagggagccggcatggggcttctccagttgctagctttcagtttcttagccctgtgcagagcccgagtgcgcgctcaggaacccgagttcagctacggctgcgcagaaggcagctgctatcccgccacgggcgaccttctcatcggccgagcacagaagctttcggtgacctcgacgtgcgggctgcacaagcccgaaccctactgtatcgtcagccacttgcaggaggacaaaaaatgcttcatatgcaattcccaagatccttatcatgagaccctgaatcctgacagccatctcattgaaaatgtggtcactacatttgctccaaaccgccttaagatttggtggcaatctgaaaatggtgtggaaaatgtaactatccaactggatttggaagcagaattccattttactcatctcataatgactttcaagacattccgtccagctgctatgctgatagaacgatcgtccgactttgggaaaacctggggtgtgtatagatacttcgcctatgactgtgaggcctcgtttccaggcatttcaactggccccatgaaaaaagtcgatgacataatttgtgattctcgatattctgacattgaaccctcaactgaaggagaggtgatatttcgtgctttagatcctgctttcaaaatagaagatccttatagcccaaggatacagaatttattaaaaattaccaacttgagaatcaagtttgtgaaactgcatactttgggagataaccttctggattccaggatggaaatcagagaaaagtattattatgcagtttatgatatggtggttcgaggaaattgcttctgctatggtcatgccagcgaatgtgcccctgtggatggattcaatgaagaagtggaaggaatggttcacggacactgcatgtgcaggcataacaccaagggcttaaactgtgaactctgcatggatttctaccatgatttaccttggagacctgctgaaggccgaaacagcaacgcctgtaaaaaatgtaactgcaatgaacattccatctcttgtcactttgacatggctgtttacctggccacggggaacgtcagcggaggcgtgtgtgatgactgtcagcacaacaccatggggcgcaactgtgagcagtgcaagccgttttactaccagcacccagagagggacatccgagatcctaatttctgtgaacgatgtacgtgtgacccagctggctctcaaaatgagggaatttgtgacagctatactgatttttctactggtctcattgctggccagtgtcggtgtaaattaaatgtggaaggagaacattgtgatgtttgcaaagaaggcttctatgatttaagcagtgaagatccatttggttgtaaatcttgtgcttgcaatcctctgggaacaattcctggagggaatccttgtgattccgagacaggtcactgctactgcaagcgtctggtgacaggacagcattgtgaccagtgcctgccagagcactggggcttaagcaatgatttggatggatgtcgaccatgtgactgtgaccttgggggagccttaaacaacagttgctttgcggagtcaggccagtgctcatgccggcctcacatgattggacgtcagtgcaacgaagtggaacctggttactactttgccaccctggatcactacctctatgaagcggaggaagccaacttggggcctggggttagcatagtggagcggcaatatatccaggaccggattccctcctggactggagccggcttcgtccgagtgcctgaaggggcttatttggagtttttcattgacaacataccatattccatggagtacgacatcctaattcgctacgagccacagctacccgaccactgggaaaaagctgtcatcacagtgcagcgacctggaaggattccaaccagcagccgatgtggtaataccatccccgatgatgacaaccaggtggtgtcattatcaccaggctcaagatatgtcgtccttcctcggccggtgtgctttgagaagggaacaaactacacggtgaggttggagctgcctcagtacacctcctctgatagcgacgtggagagcccctacacgctgatcgattctcttgttctcatgccatactgtaaatcactggacatcttcaccgtgggaggttcaggagatggggtggtcaccaacagtgcctgggaaacctttcagagataccgatgtctagagaacagcagaagcgttgtgaaaacaccgatgacagatgtttgcagaaacatcatctttagcatttctgccctgttacaccagacaggcctggcttgtgaatgcgaccctcagggttcgttaagttccgtgtgtgatcccaacggaggccagtgccagtgccggcccaacgtggttggaagaacctgcaacagatgtgcacctggaacttttggctttggccccagtggatgcaaaccttgtgagtgccatctgcaaggatctgtcaatgccttctgcaatcccgtcactggccagtgccactgtttccagggagtgtatgctcggcagtgtgatcggtgcttacctgggcactggggctttccaagttgccagccctgccagtgcaatggccacgccgatgactgcgacccagtgactggggagtgcttgaactgccaggactacaccatgggtcataactgtgaaaggtgcttggctggttactatggcgaccccatcattgggtcaggtgatcactgccgcccttgcccttgcccagatggtcccgacagtggacgccagtttgccaggagctgctaccaagatcctgttactttacagcttgcctgtgtttgtgatcctggatacattggttccagatgtgacgactgtgcctcaggatactttggcaatccatcagaagttggggggtcgtgtcagccttgccagtgtcacaacaacattgacacgacagacccagaagcctgtgacaaggagactgggaggtgtctcaagtgcctgtaccacacggaaggggaacactgtcagttctgccggtttggatactatggtgatgccctccggcaggactgtcgaaagtgtgtctgtaattacctgggcaccgtgcaagagcactgtaacggctctgactgccagtgcgacaaagccactggtcagtgcttgtgtcttcctaatgtgatcgggcagaactgtgaccgctgtgcgcccaatacctggcagctggccagtggcactggctgtgacccatgcaactgcaatgctgctcattccttcgggccatcttgcaatgagttcacggggcagtgccagtgcatgcctgggtttggaggccgcacctgcagcgagtgccaggaactcttctggggagaccccgacgtggagtgccgagcctgtgactgtgaccccaggggcattgagacgccacagtgtgaccagtccacgggccagtgtgtctgcgttgagggtgttgagggtccacgctgtgacaagtgcacgcgagggtactcgggggtcttccctgactgcacaccctgccaccagtgctttgctctctgggatgtgatcattgccgagctgaccaacaggacacacagattcctggagaaagccaaggccttgaagatcagtggtgtgatcgggccttaccgtgagactgtggactcggtggagaggaaagtcagcgagataaaagacatcctggcgcagagccccgcagcagagccactgaaaaacattgggaatctctttgaggaagcagagaaactgattaaagatgttacagaaatgatggctcaagtagaagtgaaattatctgacacaacttcccaaagcaacagcacagccaaagaactggattctctacagacagaagccgaaagcctagacaacactgtgaaagaacttgctgaacaactggaatttatcaaaaactcagatattcggggtgccttggatagcattaccaagtatttccagatgtctcttgaggcagaggagagggtgaatgcctccaccacagaacccaacagcactgtggagcagtcagccctcatgagagacagagtagaagacgtgatgatggagcgagaatcccagttcaaggaaaaacaagaggagcaggctcgcctccttgatgaactggcaggcaagctacaaagcctagacctttcagccgctgccgaaatgacctgtggaacacccccaggggcctcctgttccgagactgaatgtggcgggccaaactgcagaactgacgaaggagagaggaagtgtggggggcctggctgtggtggtctggttactgttgcacacaacgcctggcagaaagccatggacttggaccaagatgtcctgagtgccctggctgaagtggaacagctctccaagatggtctctgaagcaaaactgagggcagatgaggcaaaacaaagtgctgaagacattctgttgaagacaaatgctaccaaagaaaaaatggacaagagcaatgaggagctgagaaatctaatcaagcaaatcagaaactttttgacccaggatagtgctgatttggacagcattgaagcagttgctaatgaagtattgaaaatggagatgcctagcaccccacagcagttacagaacttgacagaagatatacgtgaacgagttgaaagcctttctcaagtagaggttattcttcagcatagtgctgctgacattgccagagctgagatgttgttagaagaagctaaaagagcaagcaaaagtgcaacagatgttaaagtcactgcagatatggtaaaggaagctctggaagaagcagaaaaggcccaggtcgcagcagagaaggcaattaaacaagcagatgaagacattcaaggaacccagaacctgttaacttcgattgagtctgaaacagcagcttctgaggaaaccttgttcaacgcgtcccagcgcatcagcgagttagagaggaatgtggaagaacttaagcggaaagctgcccaaaactccggggaggcagaatatattgaaaaagtagtatatactgtgaagcaaagtgcagaagatgttaagaagactttagatggtgaacttgatgaaaagtataaaaaagtagaaaatttaattgccaaaaaaactgaagagtcagctgatgccagaaggaaagccgaaatgctacaaaatgaagcaaaaactcttttagctcaagcaaatagcaagctgcaactgctcaaagatttagaaagaaaatatgaagacaatcaaagatacttagaagataaagctcaagaattagcaagactggaaggagaagtccgttcactcctaaaggatataagccagaaagttgctgtgtatagcacatgcttgtaacagaggagaataaaaaatggctgaggtgaacaaggtaaaacaactacattttaaaaactgacttaatgctcttcaaaataaaacatcacctatttaatgtttttaatcacattttgtatgagttaaataaagccc

SEQ ID NO: 155 - DNA, 7889 bp, Homo sapiens
gtgcaggctgctcccggggtaggtgagggaagcgcggaggcggcgcgcgggggcagtggtcggcgagcagcgcggtcctcgctaggggcgcccacccgtcagtctctccggcgcgagccgccgccaccgcccgcgccggagtcaggcccctgggcccccaggctcaagcagcgaagcggcctccgggggacgccgctaggcgagaggaacgcgccggtgcccttgccttcgccgtgacccagcgtgcgggcggcgggatgagagggagccatcgggccgcgccggccctgcggccccgggggcggctctggcccgtgctggccgtgctggcggcggccgccgcggcgggctgtgcccaggcagccatggacgagtgcacggacgagggcgggcggccgcagcgctgcatgcccgagttcgtcaacgccgccttcaacgtgactgtggtggccaccaacacgtgtgggactccgcccgaggaatactgtgtgcagaccggggtgaccggggtcaccaagtcctgtcacctgtgcgacgccgggcagccccacctgcagcacggggcagccttcctgaccgactacaacaaccaggccgacaccacctggtggcaaagccagaccatgctggccggggtgcagtaccccagctccatcaacctcacgctgcacctgggaaaagcttttgacatcacctatgtgcgtctcaagttccacaccagccgcccggagagctttgccatttacaagcgcacacgggaagacgggccctggattccttaccagtactacagtggttcctgtgagaacacctactccaaggcaaaccgcggcttcatcaggacaggaggggacgagcagcaggccttgtgtactgatgaattcagtgacatttctcccctcactgggggcaacgtggccttttctaccctggaaggaaggcccagcgcctataactttgacaatagccctgtgctgcaggaatgggtaactgccactgacatcagagtaactcttaatcgcctgaacacttttggagatgaagtgtttaacgatcccaaagttctcaagtcctattattatgccatctctgattttgctgtaggtggcagatgtaaatgtaatggacacgcaagcgagtgtatgaagaacgaatttgataagctggtgtgtaattgcaaacataacacatatggagtagactgtgaaaagtgtcttcctttcttcaatgaccggccgtggaggagggcaactgcggaaagtgccagtgaatgcctgccctgtgattgcaatggtcgatcccaggaatgctacttcgaccctgaactctatcgttccactggccatgggggccactgtaccaactgccaggataacacagatggcgcccactgtgagaggtgccgagagaacttcttccgccttggcaacaatgaagcctgctcttcatgccactgtagtcctgtgggctctctaagcacacagtgtgatagttacggcagatgcagctgtaagccaggagtgatgggggacaaatgtgaccgttgccagcctggattccattctctcactgaagcaggatgcaggccatgctcttgtgatccctctggcagcatagatgaatgtaatattgaaacaggaagatgtgtttgcaaagacaatgtcgaaggcttcaattgtgaaagatgcaaacctggattttttaatctggaatcatctaatcctcggggttgcacaccctgcttctgctttgggcattcttctgtctgtacaaacgctgttggctacagtgtttattctatctcctctacctttcagattgatgaggatgggtggcgtgcggaacagagagatggctctgaagcatctctcgagtggtcctctgagaggcaagatatcgccgtgatctcagacagctactttcctcggtacttcattgctcctgcaaagttcttgggcaagcaggtgttgagttatggtcagaacctctccttctcctttcgagtggacaggcgagatactcgcctctctgcagaagaccttgtgcttgagggagctggcttaagagtatctgtacccttgatcgctcagggcaattcctatccaagtgagaccactgtgaagtatgtcttcaggctccatgaagcaacagattacccttggaggcctgctcttaccccttttgaatttcagaagctcctaaacaacttgacctctatcaagatacgtgggacatacagtgagagaagtgctggatatttggatgatgtcaccctggcaagtgctcgtcctgggcctggagtccctgcaacttgggtggagtcctgcacctgtcctgtgggatatggagggcagttttgtgagatgtgcctctcaggttacagaagagaaactcctaatcttggaccatacagtccatgtgtgctttgcgcctgcaatggacacagcgagacctgtgatcctgagacaggtgtttgtaactgcagagacaatacggctggcccgcactgtgagaagtgcagtgatgggtactatggagattcaactgcaggcacctcctccgattgccaaccctgtccgtgtcctggaggttcaagttgtgctgttgttcccaagacaaaggaggtggtgtgcaccaactgtcctactggcaccactggtaagagatgtgagctctgtgatgatggctactttggagaccccctgggtagaaacggccctgtgagactttgccgcctgtgccagtgcagtgacaacatcgatcccaatgcagttggaaattgcaatcgcttgacgggagaatgcctgaagtgcatctataacactgctggcttctattgtgaccggtgcaaagacggattttttggaaatcccctggctcccaatccagcagacaaatgcaaagcctgcaattgcaatctgtatgggaccatgaagcagcagagcagctgtaaccccgtgacggggcagtgtgaatgtttgcctcacgtgactggccaggactgtggtgcttgtgaccctggattctacaatctgcagagtgggcaaggctgtgagaggtgtgactgccatgccttgggctccaccaatgggcagtgtgacatccgcaccggccagtgtgagtgccagcccggcatcactggtcagcactgtgagcgctgtgaggtcaaccactttgggtttggacctgaaggctgcaaaccctgtgactgtcatcctgagggatctctttcacttcagtgcaaagatgatggtcgctgtgaatgcagagaaggctttgtgggaaatcgctgtgaccagtgtgaagaaaactatttctacaatcggtcttggcctggctgccaggaatgtccagcttgttaccggctggtaaaggataaggttgctgatcatagagtgaagctccaggaattagagagtctcatagcaaaccttggaactggggatgagatggtgacagatcaagccttcgaggatagactaaaggaagcagagagggaagttatggacctccttcgtgaggcccaggatgtcaaagatgttgaccagaatttgatggatcgcctacagagagtgaataacactctgtccagccaaattagccgtttacagaatatccggaataccattgaagagactggaaacttggctgaacaagcgcgtgcccatgtagagaacacagagcggttgattgaaatcgcatccagagaacttgagaaagcaaaagtcgctgctgccaatgtgtcagtcactcagccagaatctacaggggacccaaacaacatgactcttttggcagaagaggctcgaaagcttgctgaacgtcataaacaggaagctgatgacattgttcgagtggcaaagacagccaatgatacgtcaactgaggcatacaacctgcttctgaggacactggcaggagaaaatcaaacagcatttgagattgaagagcttaataggaagtatgaacaagcgaagaacatctcacaggatctggaaaaacaagctgcccgagtacatgaggaggccaaaagggccggtgacaaagctgtggagatctatgccagcgtggctcagctgagccctttggactctgagacactggagaatgaagcaaataacataaagatggaagctgagaatctggaacaactgattgaccagaaattaaaagattatgaggacctcagagaagatatgagagggaaggaacttgaagtcaagaaccttctggagaaaggcaagactgaacagcagaccgcagaccaactcctagcccgagctgatgctgccaaggccctcgctgaagaagctgcaaagaagggacgggataccttacaagaagctaatgacattctcaacaacctgaaagattttgataggcgtgtgaacgataacaagacggccgcagaggaggcactaaggaagattcctgccatcaaccagaccatcactgaagccaatgaaaagaccagagaagcccagcaggccctgggcagtgctgcggcggatgccacagaggccaagaacaaggcccatgaggcggagaggatcgcgagcgctgtccaaaagaatgccaccagcaccaaggcagaagctgaaagaacttttgcagaagttacagatctggataatgaggtgaacaatatgttgaagcaactgcaggaagcagaaaaagagctaaagagaaaacaagatgacgctgaccaggacatgatgatggcagggatggcttcacaggctgctcaagaagccgagatcaatgccagaaaagccaaaaactctgttactagcctcctcagcattattaatgacctcttggagcagctggggcagctggatacagtggacctgaataagctaaacgagattgaaggcaccctaaacaaagccaaagatgaaatgaaggtcagcgatcttgataggaaagtgtctgacctggagaatgaagccaagaagcaggaggctgccatcatggactataaccgagatatcgaggagatcatgaaggacattcgcaatctggaggacatcaggaagaccttaccatctggctgcttcaacaccccgtccattgaaaagccctagtgtctttagggctggaaggcagcatccctctgacaggggggcagttgtgaggccacagagtgccttgacacaaagattacatttttcagacccccactcctctgctgctgtccatgactgtccttttgaaccaggaaaagtcacagagtttaaagagaagcaaattaaacatcctgaatcgggaacaaagggttttatctaataaagtgtctcttccattcacgttgctaccttacccacactttcccttctgatttgcgtgaggacgtggcatcctacgttactgtacagtggcataagcacatcgtgtgagcccatgtatgctggggtagagcaagtagccctcccctgtctcatcgataccagcagaacctcctcagtctcagtactcttgtttctatgaaggaaaagtttggctactaacagtagcattgtgatggccagtatatccagtccatggataaagaaaatgcatctgcatctcctacccctcttccttctaagcaaaaggaaataaacatcctgtgccaaaggtattggtcatttagaatgtcggtagccatccatcagtgcttttagttattatgagtgtaggacactgagccatccgtgggtcaggatgcaattatttataaaagtctccaggtgaacatggctgaagatttttctagtatattaataattgactaggaagatgaactttttttcagatctttgggcagctgataatttaaatctggatgggcagcttgcactcaccaatagaccaaaagacatcttttgatattcttataaatggaacttacacagaagaaatagggatatgataaccactaaaattttgttttcaaaatcaaactaattcttacagcttttttattagttagtcttggaactagtgttaagtatctggcagagaacagttaatccctaaggtcttgacaaaacagaagaaaaacaagcctcctcgtcctagtcttttctagcaaagggataaaacttagatggcagcttgtactgtcagaatcccgtgtatccatttgttcttctgttggagagatgagacatttgacccttagctccagttttcttctgatgtttccatcttccagaatccctcaaaaaacattgtttgccaaatcctggtggcaaatacttgcactcagtatttcacacagctgccaacgctatcgagttcctgcactttgtgatttaaatccactctaaaccttccctctaagtgtagagggaagacccttacgtggagtttcctagtgggcttctcaacttttgatcctcagctctgtggttttaagaccacagtgtgacagttccctgccacacacccccttcctcctaccaacccacctttgagattcatatatagcctttaacactatgcaactttgtactttgcgtagcaggggcggggtggggggaaagaaactattatctgacacactggtgctattaattatttcaaatttatatttttgtgtgaatgttttgtgttttgtttatcatgattatagaataaggaatttatgtaaatatacttagtcctatttctagaatgacactctgttcactttgctcaatttttcctcttcactggcacaatgtatctgaatacctccttccctcccttctagaattctttggattgtactccaaagaattgtgccttgtgtttgcagcatctccattctctaaaattaatataattgctttcctccacacccagccactgtaaagaggtaacttgggtcctcttccattgcagtcctgatgatcctaacctgcagcacggtggttttacaatgttccagagcaggaacgccaggttgacaagctatggtaggattaggaaagtttgctgaagaggatctttgacgccacagtgggactagccaggaatgagggagaaatgccctttctggcaattgttggagctggataggtaagttttataagggagtacattttgactgagcacttagggcatcaggaacagtgctacttactgatgggtagactgggagaggtggtgtaacttagttcttgatgatcccacttcctgtttccatctgcttgggatataccagagtttaccacaagtgttttgacgatatactcctgagctttcactctgctgcttctcccaggcctcttctactatggcaggagatgtggcgtgctgttgcaaagttttcacgtcattgtttcctggctagttcatttcattaagtggctacatcctaacatatgcatttggtcaaggttgcagaagaggactgaagattgactgccaagctagtttgggtgaagttcactccagcaagtctcaggccacaatggggtggtttggtttggtttccttttaactttctttttgttatttgcttttctcctccacctgtgtggtatattttttaagcagaattttattttttaaaataaaaggttctttacaagatgataccttaattacactcccgcaacacagccattattttattgtctagctccagttatctgtattttatgtaatgtaattgacaggatggctgctgcagaatgctggttgacacagggattattatactgctatttttccctgaatttttttcctttgaattccaactgtggaccttttatatgtgccttcactttagctgtttgccttaatctctacagccttgctctccggggtggttaataaaatgcaacacttggcatttttatgttttaagaaaaacagtattttatttataataaaatctgaatatttgtaacccttta

SEQ ID NO: 156 - DNA, 3084 bp, Homo sapiens
aagatctaaaaacggacatctccaccgtgggtggctcctttttctttttctttttttcccacccttcaggaagtggacgtttcgttatcttctgatccttgcaccttcttttggggaaacggggcccttctgcccagatcccctctcttttctcggaaaacaaactactaagtcggcatccggggtaactacagtggagagggtttccgcggagacgcgccgccggaccctcctctgcactttggggaggcgtgctccctccagaaccggcgttctccgcgcgcaaatcccggcgacgcggggtcgcggggtggccgccggggcagcctcgtctagcgcgcgccgcgcagacgcccccggagtcgccagctaccgcagccctcgccgcccagtgcccttcggcctcggggcgggcgcctgcgtcggtctccgcgaagcgggaaagcgcggcggccgccgggattcgggcgccgcggcagctgctccggctgccggccggcggccccgcgctcgcccgccccgcttccgcccgctgtcctgctgcacgaacccttccaactctcctttcctcccccacccttgagttacccctctgtctttcctgctgttgcgcgggtgctcccacagcggagcggagattacagagccgccgggatgccccaactctccggaggaggtggcggcggcgggggggacccggaactctgcgccacggacgagatgatccccttcaaggacgagggcgatcctcagaaggaaaagatcttcgccgagatcagtcatcccgaagaggaaggcgatttagctgacatcaagtcttccttggtgaacgagtctgaaatcatcccggccagcaacggacacgaggtggccagacaagcacaaacctctcaggagccctaccacgacaaggccagagaacaccccgatgacggaaagcatccagatggaggcctctacaacaagggaccctcctactcgagttattccgggtacataatgatgccaaatatgaataacgacccatacatgtcaaatggatctctttctccacccatcccgagaacatcaaataaagtgcccgtggtgcagccatcccatgcggtccatcctctcacccccctcatcacttacagtgacgagcacttttctccaggatcacacccgtcacacatcccatcagatgtcaactccaaacaaggcatgtccagacatcctccagctcctgatatccctactttttatcccttgtctccgggtggtgttggacagatcaccccacctcttggctggcaaggtcagcctgtatatcccatcacgggtggattcaggcaaccctacccatcctcactgtcagtcgacacttccatgtccaggttttcccatcatatgattcccggtcctcctggtccccacacaactggcatccctcatccagctattgtaacacctcaggtcaaacaggaacatccccacactgacagtgacctaatgcacgtgaagcctcagcatgaacagagaaaggagcaggagccaaaaagacctcacattaagaagcctctgaatgcttttatgttatacatgaaagaaatgagagcgaatgtcgttgctgagtgtactctaaaagaaagtgcagctatcaaccagattcttggcagaaggtggcatgccctctcccgtgaagagcaggctaaatattatgaattagcacggaaagaaagacagctacatatgcagctttatccaggctggtctgcaagagacaattatggtaagaaaaagaagaggaagagagagaaactacaggaatctgcatcaggtacaggtccaagaatgacagctgcctacatctgaaacatggtggaaaacgaagctcattcccaacgtgcaaagccaaggcagcgaccccaggacctcttctggagatggaagcttgttgaaaacccagactgtctccacggcctgcccagtcgacgccaaaggaacactgacatcaattttaccctgaggtcactgctagagacgctgatccataaagacaatcactgccaacccctctttcgtctactgcaagagccaagttccaaaataaagcataaaaaggttttttaaaaggaaatgtaaaagcacatgagaatgctagcaggctgtggggcagctgagcagcttttctccccccatatctgcgtgcacttcccagagcatcttgcatccaaacctgtaacctttcggcaaggacggtaacttggctgcatttgcctgtcatgcgcaactggagccagcaaccagctatccatcagcaccccagtggaggagttcatggaagagttccctctttgtttctgcttcatttttctttcttttcttttctcctaaagcttttatttaacagtgcaaaaggatcgtttttttttgcttttttaaacttgaatttttttaatttacactttttagttttaattttcttgtatattttgctagctatgagcttttaaataaaattgaaagttctggaaaagtttgaaataatgacataaaaagaagccttctttttctgagacagcttgtctggtaagtggcttctctgtgaattgcctgtaacacatagtggcttctccgcccttgtaaggtgttcagtagagctaaataaatgtaatagccaaaccccactctgttggtagcaattggcagccctatttcagtttattttttcttctgttttcttcttttctttttttaaacagtaaaccttaacagatgcgttcagcagactggtttgcagtgaattttcatttctttccttatcacccccttgttgtaaaaagcccagcacttgaattgttattactttaaatgttctgtatttgtatctgtttttattagccaattagtgggattttatgccagttgttaaaatgagcattgatgtacccattttttaaaaaagcaagcacagcctttgcccaaaactgtcatcctaacgtttgtcattccagtttgagttaatgtgctgagcatttttttaaaagaagctttgtaataaaacatttttaaaaattgtcatttaaaaaaaaaaaaaaaaaa

SEQ ID NO: 157 - DNA, 3701 bp, Homo sapiens
taggcggtgcatcccgttcgcgcctggggctgtggtcttcccgcgcctgaggcggcggcggcaggagctgaggggagttgtagggaactgaggggagctgctgtgtcccccgcctcctcctccccatttccgcgctcccgggaccatgtccgcgctggcgggtgaagatgtctggaggtgtccaggctgtggggaccacattgctccaagccagatatggtacaggactgtcaacgaaacctggcacggctcttgcttccggtgttcagaatgccaggattccctcaccaactggtactatgagaaggatgggaagctctactgccccaaggactactgggggaagtttggggagttctgtcatgggtgctccctgctgatgacagggccttttatggtggctggggagttcaagtaccacccagagtgctttgcctgtatgagctgcaaggtgatcattgaggatggggatgcatatgcactggtgcagcatgccaccctctactgtgggaagtgccacaatgaggtggtgctggcacccatgtttgagagactctccacagagtctgttcaggagcagctgccctactctgtcacgctcatctccatgccggccaccactgaaggcaggcggggcttctccgtgtccgtggagagtgcctgctccaactacgccaccactgtgcaagtgaaagaggtcaaccggatgcacatcagtcccaacaatcgaaacgccatccaccctggggaccgcatcctggagatcaatgggacccccgtccgcacacttcgagtggaggaggtggaggatgcaattagccagacgagccagacacttcagctgttgattgaacatgaccccgtctcccaacgcctggaccagctgcggctggaggcccggctcgctcctcacatgcagaatgccggacacccccacgccctcagcaccctggacaccaaggagaatctggaggggacactgaggagacgttccctaaggcgcagtaacagtatctccaagtcccctggccccagctccccaaaggagcccctgctgttcagccgtgacatcagccgctcagaatcccttcgttgttccagcagctattcacagcagatcttccggccctgtgacctaatccatggggaggtcctggggaagggcttctttgggcaggctatcaaggtgacacacaaagccacgggcaaagtgatggtcatgaaagagttaattcgatgtgatgaggagacccagaaaacttttctgactgaggtgaaagtgatgcgcagcctggaccaccccaatgtgctcaagttcattggtgtgctgtacaaggataagaagctgaacctcctgacagagtacattgaggggggcacactgaaggactttctgcgcagtatggatccgttcccctggcagcagaaggtcaggtttgccaaaggaatcgcctccggaatggcctatttgcactctatgtgcatcatccaccgggatctgaactcgcacaactgcctcatcaagttggacaagactgtggtggtggcagactttgggctgtcacggctcatagtggaagagaggaaaagggcccccatggagaaggccaccaccaagaaacgcaccttgcgcaagaacgaccgcaagaagcgctacacggtggtgggaaacccctactggatggcccctgagatgctgaacggaaagagctatgatgagacggtggatatcttctcctttgggatcgttctctgtgagatcattgggcaggtgtatgcagatcctgactgccttccccgaacactggactttggcctcaacgtgaagcttttctgggagaagtttgttcccacagattgtcccccggccttcttcccgctggccgccatctgctgcagactggagcctgagagcagaccagcattctcgaaattggaggactcctttgaggccctctccctgtacctgggggagctgggcatcccgctgcctgcagagctggaggagttggaccacactgtgagcatgcagtacggcctgacccgggactcacctccctagccctggcccagccccctgcaggggggtgttctacagccagcattgcccctctgtgccccattcctgctgtgagcagggccgtccgggcttcctgtggattggcggaatgtttagaagcagaacaagccattcctattacctccccaggaggcaagtgggcgcagcaccagggaaatgtatctccacaggttctggggcctagttactgtctgtaaatccaatacttgcctgaaagctgtgaagaagaaaaaaacccctggcctttgggccaggaggaatctgttactcgaatccacccaggaactccctggcagtggattgtgggaggctcttgcttacactaatcagcgtgacctggacctgctgggcaggatcccagggtgaacctgcctgtgaactctgaagtcactagtccagctgggtgcaggaggacttcaagtgtgtggacgaaagaaagactgatggctcaaagggtgtgaaaaagtcagtgatgctccccctttctactccagatcctgtccttcctggagcaaggttgagggagtaggttttgaagagtcccttaatatgtggtggaacaggccaggagttagagaaagggctggcttctgtttacctgctcactggctctagccagcccagggaccacatcaatgtgagaggaagcctccacctcatgttttcaaacttaatactggagactggctgagaacttacggacaacatcctttctgtctgaaacaaacagtcacaagcaaaggaagaggctgggggactagaaagaggccctgccctctagaaagctcagatcttggcttctgttactcatactcgggtgggctccttagtcagatgcctaaaacattttgcctaaagctcgatgggttctggaggacagtgtggcttgtcacaggcctagagtctgagggaggggagtgggagtctcagcaatctcttggtcttggcttcatggcaaccactgctcacccttcaacatgcctggtttaggcagcagcttgggctgggaagaggtggtggcagagtctcaaagctgagatgctgagagagatagctccctgagctgggccatctgacttctacctcccatgtttgctctcccaactcattagctcctgggcagcatcctcctgagccacatgtgcaggtactggaaaacctccatcttggctcccagagctctaggaactcttcatcacaactagatttgcctcttctaagtgtctatgagcttgcaccatatttaataaattgggaatgggtttggggtattaatgcaatgtgtggtggttgtattggagcagggggaattgataaaggagagtggttgctgttaatattatcttatctattgggtggtatgtgaaatattgtacatagacctgatgagttgtgggaccagatgtcatctctggtcagagtttacttgctatatagactgtacttatgtgtgaagtttgcaagcttgctttagggctgagccctggactcccagcagcagcacagttcagcattgtgtggctggttgtttcctggctgtccccagcaagtgtaggagtggtgggcctgaactgggccattgatcagactaaataaattaagcagttaacataactggcaa

SEQ ID NO: 158 - DNA, 14905 bp, Homo sapiens
cagcggtgcgagctccaggcccatgcactgaggaggcggaaacaaggggagcccccagagctccatcaagccccctccaaaggctcccctacccggtccacgccccccaccccccctccccgcctcctcccaattgtgcatttttgcagccggaggcggctccgagatggggctgtgagcttcgcccggggagggggaaagagcagcgaggagtgaagcgggggggtggggtgaagggtttggatttcggggcagggggcgcacccccgtcagcaggccctccccaaggggctcggaactctacctcttcacccacgcccctggtgcgctttgccgaaggaaagaataagaacagagaaggaggagggggaaaggaggaaaagggggaccccccaactggggggggtgaaggagagaagtagcaggaccagaggggaaggggctgctgcttgcatcagcccacaccatgctgaccccgccgttgctcctgctgctgcccctgctctcagctctggtcgcggcggctatcgacgcccctaagacttgcagccccaagcagtttgcctgcagagatcaaataacctgtatctcaaagggctggcggtgcgacggtgagagggactgcccagacggatctgacgaggcccctgagatttgtccacagagtaaggcccagcgatgccagccaaacgagcataactgcctgggtactgagctgtgtgttcccatgtcccgcctctgcaatggggtccaggactgcatggacggctcagatgaggggccccactgccgagagctccaaggcaactgctctcgcctgggctgccagcaccattgtgtccccacactcgatgggcccacctgctactgcaacagcagctttcagcttcaggcagatggcaagacctgcaaagattttgatgagtgctcagtgtacggcacctgcagccagctatgcaccaacacagacggctccttcatatgtggctgtgttgaaggatacctcctgcagccggataaccgctcctgcaaggccaagaacgagccagtagaccggccccctgtgctgttgatagccaactcccagaacatcttggccacgtacctgagtggggcccaggtgtctaccatcacacctacgagcacgcggcagaccacagccatggacttcagctatgccaacgagaccgtatgctgggtgcatgttggggacagtgctgctcagacgcagctcaagtgtgcccgcatgcctggcctaaagggcttcgtggatgagcacaccatcaacatctccctcagtctgcaccacgtggaacagatggccatcgactggctgacaggcaacttctactttgtggatgacatcgatgataggatctttgtctgcaacagaaatggggacacatgtgtcacattgctagacctggaactctacaaccccaagggcattgccctggaccctgccatggggaaggtgtttttcactgactatgggcagatcccaaaggtggaacgctgtgacatggatgggcagaaccgcaccaagctcgtcgacagcaagattgtgtttcctcatggcatcacgctggacctggtcagccgccttgtctactgggcagatgcctatctggactatattgaagtggtggactatgagggcaagggccgccagaccatcatccagggcatcctgattgagcacctgtacggcctgactgtgtttgagaattatctctatgccaccaactcggacaatgccaatgcccagcagaagacgagtgtgatccgtgtgaaccgctttaacagcaccgagtaccaggttgtcacccgggtggacaagggtggtgccctccacatctaccaccagaggcgtcagccccgagtgaggagccatgcctgtgaaaacgaccagtatgggaagccgggtggctgctctgacatctgcctgctggccaacagccacaaggcgcggacctgccgctgccgttccggcttcagcctgggcagtgacgggaagtcatgcaagaagccggagcatgagctgttcctcgtgtatggcaagggccggccaggcatcatccggggcatggatatgggggccaaggtcccggatgagcacatgatccccattgaaaacctcatgaacccccgagccctggacttccacgctgagaccggcttcatctactttgccgacaccaccagctacctcattggccgccagaagattgatggcactgagcgggagaccatcctgaaggacggcatccacaatgtggagggtgtggccgtggactggatgggagacaatctgtactggacggacgatgggcccaaaaagacaatcagcgtggccaggctggagaaagctgctcagacccgcaagactttaatcgagggcaaaatgacacaccccagggctattgtggtggatccactcaatgggtggatgtactggacagactgggaggaggaccccaaggacagtcggcgtgggcggctggagagggcgtggatggatggctcacaccgagacatctttgtcacctccaagacagtgctttggcccaatgggctaagcctggacatcccggctgggcgcctctactgggtggatgccttctacgaccgcatcgagacgatactgctcaatggcacagaccggaagattgtgtatgaaggtcctgagctgaaccacgcctttggcctgtgtcaccatggcaactacctcttctggactgagtatcggagtggcagtgtctaccgcttggaacggggtgtaggaggcgcaccccccactgtgacccttctgcgcagtgagcggccccccatctttgagatccgaatgtatgatgcccagcagcagcaagttggcaccaacaaatgccgggtgaacaatggcggctgcagcagcctgtgcttggccacccctgggagccgccagtgcgcctgtgctgaggaccaggtgttggacgcagacggcgtcacttgcttggcgaacccatcctacgtgcctccaccccagtgccagccaggcgagtttgcctgtgccaacagccgctgcatccaggagcgctggaagtgtgacggagacaacgattgcctggacaacagtgatgaggccccagccctctgccatcagcacacctgcccctcggaccgattcaagtgcgagaacaaccggtgcatccccaaccgctggctctgcgacggggacaatgactgtgggaacagtgaagatgagtccaatgccacttgttcagcccgcacctgcccccccaaccagttctcctgtgccagtggccgctgcatccccatctcctggacgtgtgatctggatgacgactgtggggaccgctctgatgagtctgcttcgtgtgcctatcccacctgcttccccctgactcagtttacctgcaacaatggcagatgtatcaacatcaactggagatgcgacaatgacaatgactgtggggacaacagtgacgaagccggctgcagccactcctgttctagcacccagttcaagtgcaacagcgggcgttgcatccccgagcactggacctgcgatggggacaatgactgcggagactacagtgatgagacacacgccaactgcaccaaccaggccacgaggccccctggtggctgccacactgatgagttccagtgccggctggatggactatgcatccccctgcggtggcgctgcgatggggacactgactgcatggactccagcgatgagaagagctgtgagggagtgacccacgtctgcgatcccagtgtcaagtttggctgcaaggactcagctcggtgcatcagcaaagcgtgggtgtgtgatggcgacaatgactgtgaggataactcggacgaggagaactgcgagtccctggcctgcaggccaccctcgcacccttgtgccaacaacacctcagtctgcctgccccctgacaagctgtgtgatggcaacgacgactgtggcgacggctcagatgagggcgagctctgcgaccagtgctctctgaataacggtggctgcagccacaactgctcagtggcacctggcgaaggcattgtgtgttcctgccctctgggcatggagctggggcccgacaaccacacctgccagatccagagctactgtgccaagcatctcaaatgcagccaaaagtgcgaccagaacaagttcagcgtgaagtgctcctgctacgagggctgggtcctggaacctgacggcgagagctgccgcagcctggaccccttcaagccgttcatcattttctccaaccgccatgaaatccggcgcatcgatcttcacaaaggagactacagcgtcctggtgcccggcctgcgcaacaccatcgccctggacttccacctcagccagagcgccctctactggaccgacgtggtggaggacaagatctaccgcgggaagctgctggacaacggagccctgactagtttcgaggtggtgattcagtatggcctggccacacccgagggcctggctgtagactggattgcaggcaacatctactgggtggagagtaacctggatcagatcgaggtggccaagctggatgggaccctccggaccaccctgctggccggtgacattgagcacccaagggcaatcgcactggatccccgggatgggatcctgttttggacagactgggatgccagcctgccccgcattgaggcagcctccatgagtggggctgggcgccgcaccgtgcaccgggagaccggctctgggggctggcccaacgggctcaccgtggactacctggagaagcgcatcctttggattgacgccaggtcagatgccatttactcagcccgttacgacggctctggccacatggaggtgcttcggggacacgagttcctgtcgcacccgtttgcagtgacgctgtacgggggggaggtctactggactgactggcgaacaaacacactggctaaggccaacaagtggaccggccacaatgtcaccgtggtacagaggaccaacacccagccctttgacctgcaggtgtaccacccctcccgccagcccatggctcccaatccctgtgaggccaatgggggccagggcccctgctcccacctgtgtctcatcaactacaaccggaccgtgtcctgcgcctgcccccacctcatgaagctccacaaggacaacaccacctgctatgagtttaagaagttcctgctgtacgcacgtcagatggagatccgaggtgtggacctggatgctccctactacaactacatcatctccttcacggtgcccgacatcgacaacgtcacagtgctagactacgatgcccgcgagcagcgtgtgtactggtctgacgtgcggacacaggccatcaagcgggccttcatcaacggcacaggcgtggagacagtcgtctctgcagacttgccaaatgcccacgggctggctgtggactgggtctcccgaaacctgttctggacaagctatgacaccaataagaagcagatcaatgtggcccggctggatggctccttcaagaacgcagtggtgcagggcctggagcagccccatggccttgtcgtccaccctctgcgtgggaagctctactggaccgatggtgacaacatcagcatggccaacatggatggcagcaatcgcaccctgctcttcagtggccagaagggccccgtgggcctggctattgacttccctgaaagcaaactctactggatcagctccgggaaccataccatcaaccgctgcaacctggatgggagtgggctggaggtcatcgatgccatgcggagccagctgggcaaggccaccgccctggccatcatgggggacaagctgtggtgggctgatcaggtgtcggaaaagatgggcacatgcagcaaggctgacggctcgggctccgtggtccttcggaacagcaccaccctggtgatgcacatgaaggtctatgacgagagcatccagctggaccataagggcaccaacccctgcagtgtcaacaacggtgactgctcccagctctgcctgcccacgtcagagacgacccgctcctgcatgtgcacagccggctatagcctccggagtggccagcaggcctgcgagggcgtaggttcctttctcctgtactctgtgcatgagggaatcaggggaattcccctggatcccaatgacaagtcagatgccctggtcccagtgtccgggacctcgctggctgtcggcatcgacttccacgctgaaaatgacaccatctactgggtggacatgggcctgagcacgatcagccgggccaagcgggaccagacgtggcgtgaagacgtggtgaccaatggcattggccgtgtggagggcattgcagtggactggatcgcaggcaacatctactggacagaccagggctttgatgtcatcgaggtcgcccggctcaatggctccttccgctacgtggtgatctcccagggtctagacaagccccgggccatcaccgtccacccggagaaagggtacttgttctggactgagtggggtcagtatccgcgtattgagcggtctcggctagatggcacggagcgtgtggtgctggtcaacgtcagcatcagctggcccaacggcatctcagtggactaccaggatgggaagctgtactggtgcgatgcacggacagacaagattgaacggatcgacctggagacaggtgagaaccgcgaggtggttctgtccagcaacaacatggacatgttttcagtgtctgtgtttgaggatttcatctactggagtgacaggactcatgccaacggctctatcaagcgcgggagcaaagacaatgccacagactccgtgcccctgcgaaccggcatcggcgtccagcttaaagacatcaaagtcttcaaccgggaccggcagaaaggcaccaacgtgtgcgcggtggccaatggcgggtgccagcagctgtgcctgtaccggggccgtgggcagcgggcctgcgcctgtgcccacgggatgctggctgaagacggagcatcgtgccgcgagtatgccggctacctgctctactcagagcgcaccattctcaagagtatccacctgtcggatgagcgcaacctcaatgcgcccgtgcagcccttcgaggaccctgagcacatgaagaacgtcatcgccctggcctttgactaccgggcaggcacctctccgggcacccccaatcgcatcttcttcagcgacatccactttgggaacatccaacagatcaacgacgatggctccaggaggatcaccattgtggaaaacgtgggctccgtggaaggcctggcctatcaccgtggctgggacactctctattggacaagctacacgacatccaccatcacgcgccacacagtggaccagacccgcccaggggccttcgagcgtgagaccgtcatcactatgtctggagatgaccacccacgggccttcgttttggacgagtgccagaacctcatgttctggaccaactggaatgagcagcatcccagcatcatgcgggcggcgctctcgggagccaatgtcctgacccttatcgagaaggacatccgtacccccaatggcctggccatcgaccaccgtgccgagaagctctacttctctgacgccaccctggacaagatcgagcggtgcgagtatgacggctcccaccgctatgtgatcctaaagtcagagcctgtccaccccttcgggctggccgtgtatggggagcacattttctggactgactgggtgcggcgggcagtgcagcgggccaacaagcacgtgggcagcaacatgaagctgctgcgcgtggacatcccccagcagcccatgggcatcatcgccgtggccaacgacaccaacagctgtgaactctctccatgccgaatcaacaacggtggctgccaggacctgtgtctgctcactcaccagggccatgtcaactgctcatgccgagggggccgaatcctccaggatgacctcacctgccgagcggtgaattcctcttgccgagcacaagatgagtttgagtgtgccaatggcgagtgcatcaacttcagcctgacctgcgacggcgtcccccactgcaaggacaagtccgatgagaagccatcctactgcaactcccgccgctgcaagaagactttccggcagtgcagcaatgggcgctgtgtgtccaacatgctgtggtgcaacggggccgacgactgtggggatggctctgacgagatcccttgcaacaagacagcctgtggtgtgggcgagttccgctgccgggacgggacctgcatcgggaactccagccgctgcaaccagtttgtggattgtgaggacgcctcagatgagatgaactgcagtgccaccgactgcagcagctacttccgcctgggcgtgaagggcgtgctcttccagccctgcgagcggacctcactctgctacgcacccagctgggtgtgtgatggcgccaatgactgtggggactacagtgatgagcgcgactgcccaggtgtgaaacgccccagatgccctctgaattacttcgcctgccctagtgggcgctgcatccccatgagctggacgtgtgacaaagaggatgactgtgaacatggcgaggacgagacccactgcaacaagttctgctcagaggcccagtttgagtgccagaaccatcgctgcatctccaagcagtggctgtgtgacggcagcgatgactgtggggatggctcagacgaggctgctcactgtgaaggcaagacgtgcggcccctcctccttctcctgccctggcacccacgtgtgcgtccccgagcgctggctctgtgacggtgacaaagactgtgctgatggtgcagacgagagcatcgcagctggttgcttgtacaacagcacttgtgacgaccgtgagttcatgtgccagaaccgccagtgcatccccaagcacttcgtgtgtgaccacgaccgtgactgtgcagatggctctgatgagtcccccgagtgtgagtacccgacctgcggccccagtgagttccgctgtgccaatgggcgctgtctgagctcccgccagtgggagtgtgatggcgagaatgactgccacgaccagagtgacgaggctcccaagaacccacactgcaccagccaagagcacaagtgcaatgcctcgtcacagttcctgtgcagcagtgggcgctgtgtggctgaggcactgctctgcaacggccaggatgactgtggcgacagctcggacgagcgtggctgccacatcaatgagtgtctcagccgcaagctcagtggctgcagccaggactgtgaggacctcaagatcggcttcaagtgccgctgtcgccctggcttccggctgaaggacgacggccggacgtgtgctgatgtggacgagtgcagcaccaccttcccctgcagccagcgctgcatcaacactcatggcagctataagtgtctgtgtgtggagggctatgcaccccgcggcggcgacccccacagctgcaaggctgtgactgacgaggaaccgtttctgatcttcgccaaccggtactacctgcgcaagctcaacctggacgggtccaactacacgttacttaagcagggcctgaacaacgccgttgccttggattttgactaccgagagcagatgatctactggacagatgtgaccacccagggcagcatgatccgaaggatgcaccttaacgggagcaatgtgcaggtcctacaccgtacaggcctcagcaaccccgatgggctggctgtggactgggtgggtggcaacctgtactggtgcgacaaaggccgggacaccatcgaggtgtccaagctcaatggggcctatcggacggtgctggtcagctctggcctccgtgagcccagggctctggtggtggatgtgcagaatgggtacctgtactggacagactggggtgaccattcactgatcggccgcatcggcatggatgggtccagccgcagcgtcatcgtggacaccaagatcacatggcccaatggcctgacgctggactatgtcactgagcgcatctactgggccgacgcccgcgaggactacattgaatttgccagcctggatggctccaatcgccacgttgtgctgagccaggacatcccgcacatctttgcactgaccctgtttgaggactacgtctactggaccgactgggaaacaaagtccattaaccgagcccacaagaccacgggcaccaacaaaacgctcctcatcagcacgctgcaccggcccatggacctgcatgtcttccatgccctgcgccagccagacgtgcccaatcacccctgcaaggtcaacaatggtggctgcagcaacctgtgcctgctgtcccccgggggagggcacaaatgtgcctgccccaccaacttctacctgggcagcgatgggcgcacctgtgtgtccaactgcacggctagccagtttgtatgcaagaacgacaagtgcatccccttctggtggaagtgtgacaccgaggacgactgcggggaccactcagacgagcccccggactgccctgagttcaagtgccggcccggacagttccagtgctccacaggtatctgcacaaaccctgccttcatctgcgatggcgacaatgactgccaggacaacagtgacgaggccaactgtgacatccacgtctgcttgcccagtcagttcaaatgcaccaacaccaaccgctgtattcccggcatcttccgctgcaatgggcaggacaactgcggagatggggaggatgagagggactgccccgaggtgacctgcgcccccaaccagttccagtgctccattaccaaacggtgcatcccccgggtctgggtctgcgaccgggacaatgactgtgtggatggcagtgatgagcccgccaactgcacccagatgacctgtggtgtggacgagttccgctgcaaggattcgggccgctgcatcccagcgcgttggaagtgtgacggagaggatgactgtggggatggctcggatgagcccaaggaagagtgtgatgaacgcacctgtgagccataccagttccgctgcaagaacaaccgctgcgtgcccggccgctggcagtgcgactacgacaacgattgcggtgacaactccgatgaagagagctgcacccctcggccctgctccgagagtgagttctcctgtgccaacggccgctgcatcgcggggcgctggaaatgcgatggagaccacgactgcgcggacggctcggacgagaaagactgcaccccccgctgtgacatggaccagttccagtgcaagagcggccactgcatccccctgcgctggcgctgtgacgcagacgccgactgcatggacggcagcgacgaggaggcctgcggcactggcgtgcggacctgccccctggacgagttccagtgcaacaacaccttgtgcaagccgctggcctggaagtgcgatggcgaggatgactgtggggacaactcagatgagaaccccgaggagtgtgcccggttcgtgtgccctcccaaccggcccttccgttgcaagaatgaccgcgtctgtctgtggatcgggcgccaatgcgatggcacggacaactgtggggatgggactgatgaagaggactgtgagccccccacagcccacaccacccactgcaaagacaagaaggagtttctgtgccggaaccagcgctgcctctcctcctccctgcgctgcaacatgttcgatgactgcggggacggctctgacgaggaggactgcagcatcgaccccaagctgaccagctgcgccaccaatgccagcatctgtggggacgaggcacgctgcgtgcgcaccgagaaagcggcctactgtgcctgccgctcgggcttccacaccgtgcccggccagcccggatgccaagacatcaacgagtgcctgcgcttcggcacctgctcccagctctgcaacaacaccaagggcggccacctctgcagctgcgctcggaacttcatgaagacgcacaacacctgcaaggccgaaggctctgagtaccaggtcctgtacatcgctgatgacaatgagatccgcagcctgttccccggccacccccattcggcttacgagcaggcattccagggtgacgagagtgtccgcattgatgctatggatgtccatgtcaaggctggccgtgtctattggaccaactggcacacgggcaccatctcctaccgcagcctgccacctgctgcgcctcctaccacttccaaccgccaccggcgacagattgaccggggtgtcacccacctcaacatttcagggctgaagatgcccagaggcatcgccatcgactgggtggccggaaacgtgtactggaccgactcgggccgagatgtgattgaggtggcgcagatgaagggcgagaaccgcaagacgctcatctcgggcatgattgacgagccccacgccattgtggtggacccactgagggggaccatgtactggtcagactggggcaaccaccccaagattgagacggcagcgatggatgggacgcttcgggagacactggtgcaggacaacattcagtggcccacaggcctggccgtggattatcacaatgagcggctgtactgggcagacgccaagctttcagtcatcggcagcatccggctcaatggcacggaccccattgtggctgctgacagcaaacgaggcctaagtcaccccttcagcatcgacgtctttgaggattacatctatggtgtcacctacatcaataatcgtgtcttcaagatccataagtttggccacagccccttggtcaacctgacagggggcctgagccacgcctctgacgtggtcctttaccatcagcacaagcagcccgaagtgaccaacccatgtgaccgcaagaaatgcgagtggctctgcctgctgagccccagtgggcctgtctgcacctgtcccaatgggaagcggctggacaacggcacatgcgtgcctgtgccctctccaacgccccccccagatgctccccggcctggaacctgtaacctgcagtgcttcaacggtggcagctgtttcctcaatgcacggaggcagcccaagtgccgctgccaaccccgctacacgggtgacaagtgtgaactggaccagtgctgggagcactgtcgcaatgggggcacctgtgctgcctccccctctggcatgcccacgtgccggtgccccacgggcttcacgggccccaaatgcacccagcaggtgtgtgcgggctactgtgccaacaacagcacctgcactgtcaaccagggcaaccagccccagtgccgatgcctacccggcttcctgggcgaccgctgccagtaccggcagtgctctggctactgtgagaactttggcacatgccagatggctgctgatggctcccgacaatgccgctgcactgcctactttgagggatcgaggtgtgaggtgaacaagtgcagccgctgtctcgaaggggcctgtgtggtcaacaagcagagtggggatgtcacctgcaactgcacggatggccgggtggcccccagctgtctgacctgcgtcggccactgcagcaatggcggctcctgtaccatgaacagcaaaatgatgcctgagtgccagtgcccaccccacatgacagggccccggtgtgaggagcacgtcttcagccagcagcagccaggacatatagcctccatcctaatccctctgctgttgctgctgctgctggttctggtggccggagtggtattctggtataagcggcgagtccaaggggctaagggcttccagcaccaacggatgaccaacggggccatgaacgtggagattggaaaccccacctacaagatgtacgaaggcggagagcctgatgatgtgggaggcctactggacgctgactttgccctggaccctgacaagcccaccaacttcaccaaccccgtgtatgccacactctacatggggggccatggcagtcgccactccctggccagcacggacgagaagcgagaactcctgggccggggccctgaggacgagataggggaccccttggcatagggccctgccccgtcggactgcccccagaaagcctcctgccccctgccggtgaagtccttcagtgagcccctccccagccagcccttccctggccccgccggatgtataaatgtaaaaatgaaggaattacattttatatgtgagcgagcaagccggcaagcgagcacagtattatttctccatcccctccctgcctgctccttggcacccccatgctgccttcagggagacaggcagggagggcttggggctgcacctcctaccctcccaccagaacgcaccccactgggagagctggtggtgcagccttcccctccctgtataagacactttgccaaggctctcccctctcgccccatccctgcttgcccgctcccacagcttcctgagggctaattctgggaagggagagttctttgctgcccctgtctggaagacgtggctctgggtgaggtaggcgggaaaggatggagtgttttagttcttgggggaggccaccccaaaccccagccccaactccaggggcacctatgagatggccatgctcaacccccctcccagacaggccctccctgtctccagggcccccaccgaggttcccagggctggagacttcctctggtaaacattcctccagcctcccctcccctggggacgccaaggaggtgggccacacccaggaagggaaagcgggcagccccgttttggggacgtgaacgttttaataatttttgctgaattcctttacaactaaataacacagatattgttataaataaaattgtaaaaaaaaaaaaaaaaaaa

SEQ ID NO: 159 - DNA, 5161 bp, Homo sapiens
cgcgcgaggagccgccgccgccgcgccatggagcccgagtgagcgcggcgcgggcccgtccggccgccggacaacatggaggcagcgccgcccgggccgccgtggccgctgctgctgctgctgctgctgctgctggcgctgtgcggctgcccggcccccgccgcggcctcgccgctcctgctatttgccaaccgccgggacgtacggctggtggacgccggcggagtcaagctggagtccaccatcgtggtcagcggcctggaggatgcggccgcagtggacttccagttttccaagggagccgtgtactggacagacgtgagcgaggaggccatcaagcagacctacctgaaccagacgggggccgccgtgcagaacgtggtcatctccggcctggtctctcccgacggcctcgcctgcgactgggtgggcaagaagctgtactggacggactcagagaccaaccgcatcgaggtggccaacctcaatggcacatcccggaaggtgctcttctggcaggaccttgaccagccgagggccatcgccttggaccccgctcacgggtacatgtactggacagactggggtgagacgccccggattgagcgggcagggatggatggcagcacccggaagatcattgtggactcggacatttactggcccaatggactgaccatcgacctggaggagcagaagctctactgggctgacgccaagctcagcttcatccaccgtgccaacctggacggctcgttccggcagaaggtggtggagggcagcctgacgcaccccttcgccctgacgctctccggggacactctgtactggacagactggcagacccgctccatccatgcctgcaacaagcgcactggggggaagaggaaggagatcctgagtgccctctactcacccatggacatccaggtgctgagccaggagcggcagcctttcttccacactcgctgtgaggaggacaatggcggctgctcccacctgtgcctgctgtccccaagcgagcctttctacacatgcgcctgccccacgggtgtgcagctgcaggacaacggcaggacgtgtaaggcaggagccgaggaggtgctgctgctggcccggcggacggacctacggaggatctcgctggacacgccggacttcaccgacatcgtgctgcaggtggacgacatccggcacgccattgccatcgactacgacccgctagagggctatgtctactggacagatgacgaggtgcgggccatccgcagggcgtacctggacgggtctggggcgcagacgctggtcaacaccgagatcaacgaccccgatggcatcgcggtcgactgggtggcccgaaacctctactggaccgacacgggcacggaccgcatcgaggtgacgcgcctcaacggcacctcccgcaagatcctggtgtcggaggacctggacgagccccgagccatcgcactgcaccccgtgatgggcctcatgtactggacagactggggagagaaccctaaaatcgagtgtgccaacttggatgggcaggagcggcgtgtgctggtcaatgcctccctcgggtggcccaacggcctggccctggacctgcaggaggggaagctctactggggagacgccaagacagacaagatcgaggtgatcaatgttgatgggacgaagaggcggaccctcctggaggacaagctcccgcacatttttgggttcacgctgctgggggacttcatctactggactgactggcagcgccgcagcatcgagcgggtgcacaaggtcaaggccagccgggacgtcatcattgaccagctgcccgacctgatggggctcaaagctgtgaatgtggccaaggtcgtcggaaccaacccgtgtgcggacaggaacggggggtgcagccacctgtgcttcttcacaccccacgcaacccggtgtggctgccccatcggcctggagctgctgagtgacatgaagacctgcatcgtgcctgaggccttcttggtcttcaccagcagagccgccatccacaggatctccctcgagaccaataacaacgacgtggccatcccgctcacgggcgtcaaggaggcctcagccctggactttgatgtgtccaacaaccacatctactggacagacgtcagcctgaagaccatcagccgcgccttcatgaacgggagctcggtggagcacgtggtggagtttggccttgactaccccgagggcatggccgttgactggatgggcaagaacctctactgggccgacactgggaccaacagaatcgaagtggcgcggctggacgggcagttccggcaagtcctcgtgtggagggacttggacaacccgaggtcgctggccctggatcccaccaagggctacatctactggaccgagtggggcggcaagccgaggatcgtgcgggccttcatggacgggaccaactgcatgacgctggtggacaaggtgggccgggccaacgacctcaccattgactacgctgaccagcgcctctactggaccgacctggacaccaacatgatcgagtcgtccaacatgctgggtcaggagcgggtcgtgattgccgacgatctcccgcacccgttcggtctgacgcagtacagcgattatatctactggacagactggaatctgcacagcattgagcgggccgacaagactagcggccggaaccgcaccctcatccagggccacctggacttcgtgatggacatcctggtgttccactcctcccgccaggatggcctcaatgactgtatgcacaacaacgggcagtgtgggcagctgtgccttgccatccccggcggccaccgctgcggctgcgcctcacactacaccctggaccccagcagccgcaactgcagcccgcccaccaccttcttgctgttcagccagaaatctgccatcagtcggatgatcccggacgaccagcacagcccggatctcatcctgcccctgcatggactgaggaacgtcaaagccatcgactatgacccactggacaagttcatctactgggtggatgggcgccagaacatcaagcgagccaaggacgacgggacccagccctttgttttgacctctctgagccaaggccaaaacccagacaggcagccccacgacctcagcatcgacatctacagccggacactgttctggacgtgcgaggccaccaataccatcaacgtccacaggctgagcggggaagccatgggggtggtgctgcgtggggaccgcgacaagcccagggccatcgtcgtcaacgcggagcgagggtacctgtacttcaccaacatgcaggaccgggcagccaagatcgaacgcgcagccctggacggcaccgagcgcgaggtcctcttcaccaccggcctcatccgccctgtggccctggtggtggacaacacactgggcaagctgttctgggtggacgcggacctgaagcgcattgagagctgtgacctgtcaggggccaaccgcctgaccctggaggacgccaacatcgtgcagcctctgggcctgaccatccttggcaagcatctctactggatcgaccgccagcagcagatgatcgagcgtgtggagaagaccaccggggacaagcggactcgcatccagggccgtgtcgcccacctcactggcatccatgcagtggaggaagtcagcctggaggagttctcagcccacccatgtgcccgtgacaatggtggctgctcccacatctgtattgccaagggtgatgggacaccacggtgctcatgcccagtccacctcgtgctcctgcagaacctgctgacctgtggagagccgcccacctgctccccggaccagtttgcatgtgccacaggggagatcgactgtatccccggggcctggcgctgtgacggctttcccgagtgcgatgaccagagcgacgaggagggctgccccgtgtgctccgccgcccagttcccctgcgcgcggggtcagtgtgtggacctgcgcctgcgctgcgacggcgaggcagactgtcaggaccgctcagacgaggcggactgtgacgccatctgcctgcccaaccagttccggtgtgcgagcggccagtgtgtcctcatcaaacagcagtgcgactccttccccgactgtatcgacggctccgacgagctcatgtgtgaaatcaccaagccgccctcagacgacagcccggcccacagcagtgccatcgggcccgtcattggcatcatcctctctctcttcgtcatgggtggtgtctattttgtgtgccagcgcgtggtgtgccagcgctatgcgggggccaacgggcccttcccgcacgagtatgtcagcgggaccccgcacgtgcccctcaatttcatagccccgggcggttcccagcatggccccttcacaggcatcgcatgcggaaagtccatgatgagctccgtgagcctgatggggggccggggcggggtgcccctctacgaccggaaccacgtcacaggggcctcgtccagcagctcgtccagcacgaaggccacgctgtacccgccgatcctgaacccgccgccctccccggccacggacccctccctgtacaacatggacatgttctactcttcaaacattccggccactgcgagaccgtacaggccctacatcattcgaggaatggcgcccccgacgacgccctgcagcaccgacgtgtgtgacagcgactacagcgccagccgctggaaggccagcaagtactacctggatttgaactcggactcagacccctatccacccccacccacgccccacagccagtacctgtcggcggaggacagctgcccgccctcgcccgccaccgagaggagctacttccatctcttcccgccccctccgtccccctgcacggactcatcctgacctcggccgggccactctggcttctctgtgcccctgtaaatagttttaaatatgaacaaagaaaaaaatatattttatgatttaaaaaataaatataattgggattttaaaaacatgagaaatgtgaactgtgatggggtgggcagggctgggagaactttgtacagtggagaaatatttataaacttaattttgtaaaacagaaaaaaaaaaaaaaaaaaaaaaaaaaaaaaaaaaa

SEQ ID NO: 160 - DNA, 10088 bp, Homo sapiens
gtgcccctttctttcttctctcgctgggaagctgggaagtatgagcgtgcagccctgccgctgcggcggccgccccggctcctcgcctcccccacttctggccacccctcgccggtgagagaagagaacgcgagaagggaagatgggggccgtcctgaggagcctcctggcctgcagcttctgtgtgctcctgagagcggcccctttgttgctttatgcaaacagacgggacttgcgattggttgatgctacaaatggcaaagagaatgctacgattgtagttggaggcttggaggatgcagctgcggtggactttgtgtttagtcatggcttgatatactggagtgatgtcagcgaagaagccattaaacgaacagaatttaacaaaactgagagtgtgcagaatgttgttgtttctggattattgtcccccgatgggctggcatgtgattggcttggagaaaaattgtactggacagattctgaaactaatcggattgaagtttctaatttagatggatctttacgaaaagttttattttggcaagagttggatcaacccagagctattgccttagatccttcaagtgggttcatgtactggacagactggggagaagtgccaaagatagaacgtgctggaatggatggttcaagtcgcttcattataataaacagtgaaatttactggccaaatggactgactttggattatgaagaacaaaagctttattgggcagatgcaaaacttaatttcatccacaaatcaaatctggatggaacaaatcggcaggcagtggttaaaggttcccttccacatccttttgccttgacgttatttgaggacatattgtactggactgactggagcacacactccattttggcttgcaacaagtatactggtgagggtctgcgtgaaatccattctgacatcttctctcccatggatatacatgccttcagccaacagaggcagccaaatgccacaaatccatgtggaattgacaatgggggttgttcccatttgtgtttgatgtctccagtcaagcctttttatcagtgtgcttgccccactggggtcaaactcctggagaatggaaaaacctgcaaagatggtgccacagaattattgcttttagctcgaaggacagacttgagacgcatttctttggatacaccagattttacagacattgttctgcagttagaagacatccgtcatgccattgccatagattacgatcctgtggaaggctacatctactggactgatgatgaagtgagggccatacgccgttcatttatagatggatctggcagtcagtttgtggtcactgctcaaattgcccatcctgatggtattgctgtggactgggttgcacgaaatctttattggacagacactggcactgatcgaatagaagtgacaaggctcaatgggaccatgaggaagatcttgatttcagaggacttagaggaaccccgggctattgtgttagatcccatggttgggtacatgtattggactgactggggagaaattccgaaaattgagcgagcagctctggatggttctgaccgtgtagtattggttaacacttctcttggttggccaaatggtttagccttggattatgatgaaggcaaaatatactggggagatgccaaaacagacaagattgaggttatgaatactgatggcactgggagacgagtactagtggaagacaaaattcctcacatatttggatttactttgttgggtgactatgtttactggactgactggcagaggcgtagcattgaaagagttcataaacgaagtgcagagagggaagtgatcatagatcagctgcctgacctcatgggcctaaaggctacaaatgttcatcgagtgattggttccaacccctgtgctgaggaaaacgggggatgtagccatctctgcctctatagacctcagggccttcgctgtgcttgccctattggctttgaactcatcagtgacatgaagacctgcattgtcccagaggctttccttttgttttcacggagagcagatatcagacgaatttctctggaaacaaacaataataatgtggctattccactcactggtgtcaaagaagcttctgctttggattttgatgtgacagacaaccgaatttattggactgatatatcactcaagaccatcagcagagcctttatgaatggcagtgcactggaacatgtggtagaattcggcttagattatccagaaggcatggcagtagactggcttgggaagaacttgtactgggcagacacaggaacgaatcgaattgaggtgtcaaagttggatgggcagcaccgacaagttttggtgtggaaagacctagatagtcccagagctctcgcgttggaccctgccgaaggatttatgtattggactgaatggggtggaaaacctaagatagacagagctgcaatggatggaagtgaacgtactaccttagttccaaatgtggggcgggcaaacggcctaactattgattatgctaaaaggaggctttattggacagacctggacaccaacttaatagaatcttcaaatatgcttgggctcaaccgtgaagttatagcagatgacttgcctcatccttttggcttaactcagtaccaagattatatctactggacggactggagccgacgcagcattgagcgtgccaacaaaaccagtggccaaaaccgcaccatcattcagggccatttggattatgtgatggacatcctcgtctttcactcatctcgacagtcagggtggaatgaatgtgcttccagcaatgggcactgctcccacctctgcttggctgtgccagttgggggttttgtttgtggatgccctgcccactactctcttaatgctgacaacaggacttgtagtgctcctacgactttcctgctcttcagtcaaaagagtgccatcaaccgcatggtgattgatgaacaacagagccccgacatcatccttcccatccacagccttcggaatgtccgggccattgactatgacccactggacaagcaactctattggattgactcacgacaaaacatgatccgaaaggcacaagaagatggcagccagggctttactgtggttgtgagctcagttccgagtcagaacctggaaatacaaccctatgacctcagcattgatatttacagccgctacatctactggacttgtgaggctaccaatgtcattaatgtgacaagattagatgggagatcagttggagtggtgctgaaaggcgagcaggacagacctcgagccgttgtggtaaacccagagaaagggtatatgtattttaccaatcttcaggaaaggtctcctaaaattgaacgggctgctttggatgggacagaacgggaggtcctctttttcagtggcttaagtaaaccaattgctttagcccttgatagcaggctgggcaagctcttttgggctgattcagatctccggcgaattgaaagcagtgatctctcaggtgctaaccggatagtattagaagactccaatatcttgcagcctgtgggacttactgtgtttgaaaactggctctattggattgataaacagcagcaaatgattgaaaaaattgacatgacaggtcgagagggtagaaccaaagtccaagctcgaattgcccagcttagtgacattcatgcagtaaaggagctgaaccttcaagaatacagacagcacccttgtgctcaggataatggtggctgttcacatatttgtcttgtaaagggggatggtactacaaggtgttcttgccccatgcacctggttctacttcaagatgagctatcatgtggagaacctccaacatgttctcctcagcagtttacttgtttcacgggggaaattgactgtatccctgtggcttggcggtgcgatgggtttactgaatgtgaagaccacagtgatgaactcaattgtcctgtatgctcagagtcccagttccagtgtgccagtgggcagtgtattgatggtgccctccgatgcaatggagatgcaaactgccaggacaaatcagatgagaagaactgtgaagtgctttgtttaattgatcagttccgctgtgccaatggtcagtgcattggaaagcacaagaagtgtgatcataatgtggattgcagtgacaagtcagatgaactggattgttatccgactgaagaaccagcaccacaggccaccaatacagttggttctgttattggcgtaattgtcaccatttttgtgtctggaactgtatactttatctgccagaggatgttgtgtccacgtatgaagggagatggggaaactatgactaatgactatgtagttcatggaccagcttctgtgcctcttggttatgtgccacacccaagttctttgtcaggatctcttccaggaatgtctcgaggtaaatcaatgatcagctccctcagtatcatggggggaagcagtggacccccctatgaccgagcccatgttacaggagcatcatcaagtagttcttcaagcaccaaaggcacttacttccctgcaattttgaaccctccaccatccccagccacagagcgatcacattacactatggaatttggatattcttcaaacagtccttccactcataggtcatacagctacaggccatatagctaccggcactttgcaccccccaccacaccctgcagcacagatgtttgtgacagtgactatgctcctagtcggagaatgacctcagtggcaacagccaagggctataccagtgacttgaactatgattcagaacctgtgcccccacctcccacaccccgaagccaatacttgtcagcagaggagaactatgaaagctgcccaccttctccatacacagagaggagctattctcatcacctctacccaccgccaccctctccctgtacagactcctcctgaggaggggccctcctcctctgactgcctccaacgtaaaaatgtaaatataaatttggttgagatctggagggggggagggagctattagagaaggatgaggcagaccatgtacagttaaaattataaaatggggtagggaatactggagatatttgtacagaagaaaaggatatttatatattttcttaaaacagcagatttgctgcttgtgccataaaagtttgtataaaaaaaatttgtactaaaagttttatttttgcaaactaaatacacaaagcatgccttaaacccagtgaagcaactgagtacaaaggaaacaggaataataaaggcatcactgaccaggaatatctgggctttattgataccaaaaataaaaaagaggaagaagaaaaattaagtccatctcagagcagcaaaccatagatacatggatgtagccagatagccttcagttaactaacatttgagggccaacaagtaagaaatgatgaaaggaaaaaaatgcaattaatactaaccttggacgaagggctttgttttctctaggaatccaacagtgctagtgaggaaagtagatatttctaaaaacccattctgggtgttgctgttgtaggagagatcagccctctggtaagatgccatgaagctgtgtgtgtgtgcaagtctctgtccctacctttagaatccatacctctgtcaaaatgaatttttttctctaggtatgtttaccttgctgcctcctccagcaacttggtaagtcattttgctaagataccatgatttttttaagctgaagcattgactaaatggaattttctaaattaaacttgattttaatatttcttctagctccattccccagtaggcttagctcttcaatttgactgctgtttttgcataatgatcaaaagttagacatattatttctcttcttccaagattgttttaatgctcattaaaatgtctttttacaacacatatagacaatgtttaagaattaaaaatttaaccattatgtttttgttgtaaatctcatatccttgcactactttcagcatatatcacagtacgaaatcatttatatatatatatatatatatatatatatatatatatatatatatatatatattttgtttgtttgtttgttttctgagtaaaacatttaaatatgttctggttagagacaatctatttaaaaagatttttttcttattaggattttccctatattaacagtttgtgatgttttcatgttctttagaccggtttttctcagaataatgtctacatacatacctcttctaatgtgtgacatgaatttaatatctttctgttacccactgtgaatgttaggctgttttcaaattatccacaaattattcttgtaatcacccaatatttttatgtgggtcctctcttacccattatggattaagatagtttaacaaatttaacaatgaggattaaatgagaaggcaaactgttaacttctcagctgtcagaatttgggtggaagggaataatggaagcctcttttgtgatctgcctgacctgctgtcatgtatggtactggggctgctacatcttgagctatcagggctgacctgtggaatgattctagcacttgctctgccaccttgccagaagttcgtttcctgctttttacacatgtgtagcacttctctgctaaaattgaatggttttaaactaatgtatttttagcttaagaggtgttggtcagttaattattgaattttttttttttcttttttaattctgtcttgccaaggcctctctgggtttcagggcccaagagaaaacagtggaagaaaggattcagaatttgggcaagggtgaagtaactgttcatgcaagttaaaaatacctaagtaaagtttttgaagataaaattgtggtttcagaataatgctgattgttggagactgtaagaatcaggtgcacttgattttgcatataagcaaatggtaaatctatcagaatcctaaaacagacaagcatgaactcttcccattgctggaactaagtgcccacagtgtcagacaaaatggacattgaacttggattctgtgatacacagggcacttgatgcttaaatgaagatggaaaggttagcaatacctgggtgtcagttagaatttgagaattctatatgtttacatatttaaatgtgcatcttgatctggtgggcttcccatgtggagacttgcactctaattaactaagaagaatattgccttgttggatctcagtccacgtgcttgcactgcgatggcaatggcctcttcttcaaaatactaatttgtgtgccaatttgtttaaaattatttgaaggcagttcagcctaatctcagtgttctctttctggggtagatgagatggattcttaatatttctgggagtactttttaatgagagaattgtcaaatttggaaagatttattgagccttaggttacatggacagttaagcttaagtaaactgtatattgattatcaaacacaagctgtaattggaaaagttgagaggaaaagcatgagatcacaaattagggggaaaaaagaaaagggatttttaaatttggtgtattaaattcattgtccaagggggaaaatgaataatgtttcattagattccttatatgcaaaagtatttattttgaacatgtgtcctaaaatatatgcactaactgatgtgattaaaattgtccaagaaataaacttgagcataacatactttgtgtgcaccacagtaagctattctgcattgaagtggtcttttataactaaggcctggactttgctccaacagagtcgtggtcttctgaatagtgacttaaggagttttgtttgcttaagtcagataatagcacattcacagggaaacaaagagagttggtggatagaattttctgactattaatttttcttccatgaaattttattatgcctttggcactttctgccactcttacagcatatcacaagatatctgtttagcagaagattatgtagttactttaattttaatataaaagtagcttgtgatacattaccaagagatctctgattctttagtaagtttgagaacacctattctacagagatgataggtacttagaaatgaagactttaaagtacattttaatctaatataggccagtaattgggggaaggggctttgagcagtacaattttaagatgattttgagggttgtatttctttatcatttaaaaatatcctaaagtcagtaatttatatgaaggaaactcattcattattgaaggtattaaaaatagccatcatctgtattaggtagcagttttggaggatcatctttttcttttgctataaagccctattaatgaagaatacttccagtagagttaatagctgtagcttacctagtgtgttaatgaagtgtgtttatttatgtgacttgataccagtagtcataatagagactgaagaggtatgcgttaagcacgcctacttctatgcagtaaacaggctgcagctgcctagattagattcttagaaatgtcatattttgaattgttttatttcttgtaggggaagctttgtcccacttcattcatttgcatgccataggaattacatattggttatcattacgtatctaacaagattcagaaacaaaaatcttggacttttcacatccgaaatatgtcagctcttaataaatgtgtggtgcttaagtctacatatggcatccatagttgatttagagtatggatatgagtgtgttgaccagttatcagtaggtggacaaatatttgggcatctacagatgagactatgcactaagtgtggactgagtcctaaagaagcttatagtcaggtgttgtttaaaacattatcagaattcttaaacccaaggaatttaattttatttggtatttcttaagcctaaaatgaaccaagagaaagatgattttagaaagtacttgtagtgaaagatgattttagaaagtacttgtagtgcatgtgtggcttctgacttttgggatggcaccattttataatagtttcaaaatttagcttttgaaattctcaacattttatggtagaagactttggacctcaagtataaaattatacgtttataatttttttaaaatttaaattataagtattgtgaattcacactctcaggctattgtctgacttgatctacgtctcataaagcctgtacctgagtggagtggaaggtggagtcttaggttaatcagttactgactctaccctcaccctctttcaattgaggtaaactttgctgtttttctttttcataaagcattctcaaattgttgagtttattgctgaaaaaaatctccatgactttacagatagaattacaaactaaatgatgtcttgtatttagaagcagagtacagacctaacgaactgttagattctccaccatcacttagggtttgcccagaagcaacaccagagaattacagacaacgcgcttttgctgaactgtccattttggtggttgtgtttttcagtcaaatataagcaggatgggcgatagagatatatttatatatagatacatattctatatatctaatgcctaaatatgggtattaaagggaaaatttttaaagtctgattaaatccaatatgacatgaaattaaatatatggattagtaaggaaaaatgttaaaaagtagagaggataccaagaagattaaactggactagccttatttgcaagtgaaggatctggtgctgctttcagatgtttatcttttatttttttcccttaagctttaatcttcgtcattgtcttaaagtcaactggtgtttcttgttcattgactttggtacgatggtgctttgcaaggatgtatttatgttataatggccaacatttggtcagcccttgtccacttattcacttccctccttttgtaaaataagtgctttaattataaactgtataaaaataccttgtataaaccccttttttgattattacaataaataagctgaattgtaacaaatgaaatttgatttttgtaataaaacagtggaaaagtaaaaaaa

SEQ ID NO: 161 - DNA, 2222 bp, Homo sapiens
attcggcacgagggaggaagcgagaggtgctgccctccccccggagttggaagcgcgttacccgggtccaaaatgcccaagaagaagccgacgcccatccagctgaacccggcccccgacggctctgcagttaacgggaccagctctgcggagaccaacttggaggccttgcagaagaagctggaggagctagagcttgatgagcagcagcgaaagcgccttgaggcctttcttacccagaagcagaaggtgggagaactgaaggatgacgactttgagaagatcagtgagctgggggctggcaatggcggtgtggtgttcaaggtctcccacaagccttctggcctggtcatggccagaaagctaattcatctggagatcaaacccgcaatccggaaccagatcataagggagctgcaggttctgcatgagtgcaactctccgtacatcgtgggcttctatggtgcgttctacagcgatggcgagatcagtatctgcatggagcacatggatggaggttctctggatcaagtcctgaagaaagctggaagaattcctgaacaaattttaggaaaagttagcattgctgtaataaaaggcctgacatatctgagggagaagcacaagatcatgcacagagatgtcaagccctccaacatcctagtcaactcccgtggggagatcaagctctgtgactttggggtcagcgggcagctcatcgactccatggccaactccttcgtgggcacaaggtcctacatgtcgccagaaagactccaggggactcattactctgtgcagtcagacatctggagcatgggactgtctctggtagagatggcggttgggaggtatcccatccctcctccagatgccaaggagctggagctgatgtttgggtgccaggtggaaggagatgcggctgagaccccacccaggccaaggacccccgggaggccccttagctcatacggaatggacagccgacctcccatggcaatttttgagttgttggattacatagtcaacgagcctcctccaaaactgcccagtggagtgttcagtctggaatttcaagattttgtgaataaatgcttaataaaaaaccccgcagagagagcagatttgaagcaactcatggttcatgcttttatcaagagatctgatgctgaggaagtggattttgcaggttggctctgctccaccatcggccttaaccagcccagcacaccaacccatgctgctggcgtctaagtgtttgggaagcaacaaagagcgagtcccctgcccggtggtttgccatgtcgcttttgggcctccttcccatgcctgtctctgttcagatgtgcatttcacctgtgacaaaggatgaagaacacagcatgtgccaagattctactcttgtcatttttaatattactgtctttattcttattactattattgttcccctaagtggattggctttgtgcttggggctatttgtgtgtatgctgatgatcaaaacctgtgccaggctgaattacagtgaaatttttggtgaatgtgggtagtcattcttacaattgcactgctgttcctgctccatgactggctgtctgcctgtattttcggactttgacatttgacatttggtggactttatcttgctgggcatactttctctctaggagggagccttgtgagatccttcacaggcagtgcatgtgaagcatgctttgctgctatgaaaatgagcatcagagagtgtacatcatgttattttattattattatttgcttttcatgtagaactcagcagttgacatccaaatctagccagagcccttcactgccatgatagctggggcttcaccagtctgtctactgtggtgatctgtagacttctggttgtatttctatatttattttcagtatactgtgtgggatacttagtggtatgtctctttaagttttgattaatgtttcttaaatggaattatttgaatgtcacaaattgatcaagatattaaaatgtcggatttatctttccccatatccaagtaccaatgctgttgtaaacaacgtgtatagtgcctaaaattgtatgaaaatccttttaaccattttaacctagatgtttaacaaatctaatctcttattctaataaatatactatgaaataaaaaaaaaaggagaaagctaaaaaaaaaaaaaaaaaaaaaaaaaaaaaaaaaaaaaaa

SEQ ID NO: 162 - DNA, 1759 bp, Homo sapiens
cccctgcctctcggactcgggctgcggcgtcagccttcttcgggcctcggcagcggtagcggctcgctcgcctcagccccagcgcccctcggctaccctcggcccaggcccgcagcgccgcccgccctcggccgccccgacgccggcctgggccgcggccgcagccccgggctcgcgtaggcgccgaccgctcccggcccgccccctatgggccccggctagaggcgccgccgccgccggcccgcggagccccgatgctggcccggaggaagccggtgctgccggcgctcaccatcaaccctaccatcgccgagggcccatcccctaccagcgagggcgcctccgaggcaaacctggtggacctgcagaagaagctggaggagctggaacttgacgagcagcagaagaagcggctggaagcctttctcacccagaaagccaaggtcggcgaactcaaagacgatgacttcgaaaggatctcagagctgggcgcgggcaacggcggggtggtcaccaaagtccagcacagaccctcgggcctcatcatggccaggaagctgatccaccttgagatcaagccggccatccggaaccagatcatccgcgagctgcaggtcctgcacgaatgcaactcgccgtacatcgtgggcttctacggggccttctacagtgacggggagatcagcatttgcatggaacacatggacggcggctccctggaccaggtgctgaaagaggccaagaggattcccgaggagatcctggggaaagtcagcatcgcggttctccggggcttggcgtacctccgagagaagcaccagatcatgcaccgagatgtgaagccctccaacatcctcgtgaactctagaggggagatcaagctgtgtgacttcggggtgagcggccagctcatagactccatggccaactccttcgtgggcacgcgctcctacatggctccggagcggttgcagggcacacattactcggtgcagtcggacatctggagcatgggcctgtccctggtggagctggccgtcggaaggtaccccatccccccgcccgacgccaaagagctggaggccatctttggccggcccgtggtcgacggggaagaaggagagcctcacagcatctcgcctcggccgaggccccccgggcgccccgtcagcggtcacgggatggatagccggcctgccatggccatctttgaactcctggactatattgtgaacgagccacctcctaagctgcccaacggtgtgttcacccccgacttccaggagtttgtcaataaatgcctcatcaagaacccagcggagcgggcggacctgaagatgctcacaaaccacaccttcatcaagcggtccgaggtggaagaagtggattttgccggctggttgtgtaaaaccctgcggctgaaccagcccggcacacccacgcgcaccgccgtgtgacagtggccgggctccctgcgtcccgctggtgacctgcccaccgtccctgtccatgccccgcccttccagctgaggacaggctggcgcctccacccaccctcctgcctcacccctgcggagagcaccgtggcggggcgacagcgcatgcaggaacgggggtctcctctcctgcccgtcctggccggggtgcctctggggacgggcgacgctgctgtgtgtggtctcagaggctctgcttccttaggttacaaaacaaaacagggagagaaaaagcaaaaaaaaaaaaaaaaaaaaaaaaaaaa

SEQ ID NO: 163 - DNA, 2319 bp, Homo sapiens
gcaggggcggggcctgagtcagcgcagttcggccggggtctccccggcgctgcccagtctgtctccggcgccgcccgtcgcggactcgtccttgctgcagtcgccgccgcagtcctcgccgcagtcgccgccgccgccgccgccgccgccgctgctcctccgcctggcctgggccgtctgcccgcagccatgagcgtgctcggccccggtggagcccgcagtcctctagattagtctccaccgccgtccaggacccacttgcagcatggagtcgcccgcctcgagccagcccgccagcatgccccagtccaaaggaaaatccaagaggaagaaggatctacggatatcctgcatgtccaagccacccgcacccaaccccacacccccccggaacctggactcccggaccttcatcaccattggagacagaaactttgaggtggaggctgatgacttggtgaccatctcagaactgggccgtggagcctatggggtggtagagaaggtgcggcacgcccagagcggcaccatcatggccgtgaagcggatccgggccaccgtgaactcacaggagcagaagcggctgctcatggacctggacatcaacatgcgcacggtcgactgtttctacactgtcaccttctacggggcactattcagagagggagacgtgtggatctgcatggagctcatggacacatccttggacaagttctaccggaaggtgctggataaaaacatgacaattccagaggacatccttggggagattgctgtgtctatcgtgcgggccctggagcatctgcacagcaagctgtcggtgatccacagagatgtgaagccctccaatgtccttatcaacaaggagggccatgtgaagatgtgtgactttggcatcagtggctacttggtggactctgtggccaagacgatggatgccggctgcaagccctacatggcccctgagaggatcaacccagagctgaaccagaagggctacaatgtcaagtccgacgtctggagcctgggcatcaccatgattgagatggccatcctgcggttcccttacgagtcctgggggaccccgttccagcagctgaagcaggtggtggaggagccgtccccccagctcccagccgaccgtttctcccccgagtttgtggacttcactgctcagtgcctgaggaagaaccccgcagagcgtatgagctacctggagctgatggagcaccccttcttcaccttgcacaaaaccaagaagacggacattgctgccttcgtgaaggagatcctgggagaagactcataggggctgggcctcggaccccactccggccctccagagccccacagccccatctgcgggggcagtgctcacccacaccataagctactgccatcctggcccagggcatctgggaggaaccgagggggctgctcccacctggctctgtggcgagccatttgtcccaagtgccaaagaagcagaccattggggctcccagccaggcccttgtcggccccaccagtgcctctccctgctgctcctaggacccgtctccagctgctgagatcctggactgagggggcctggatgccccctgtggatgctgctgcccctgcacagcaggctgccagtgcctgggtggatgggccaccgccttgcccagcctggatgccatccaagttgtatatttttttaatctctcgactgaatggactttgcacactttggcccagggtggccacacctctatcccggctttggtgcggggtacacaagaggggatgagttgtgtgaataccccaagactcccatgagggagatgccatgagccgcccaaggccttcccctggcactggcaaacagggcctctgcggagcacactggctcacccagtcctgcccgccaccgttatcggtgtcattcacctttcgtgttttttttaatttatcctctgttgattttttcttttgctttatgggtttggcttgtttttcttgcatggtttggagctgatcgcttctcccccaccccctagggtaccagcaggcagagccttgccctctgctcaggctggggtccagtgggaggggcccaagatctctgctcagagaagtgcagggggagccttccagctcactctccctgaggactggcttgacaggggctatgggtttgctttggtgttgtttttaaaaaaagaaaatatatttttttgaaaaaacgactgcccatcccgggtcctttccctgatgggttggggcagttacctggttgctgttttaattaaaaaaaaaaaaaaaaaaaggactaaa

SEQ ID NO: 164 - DNA, 3574 bp, Homo sapiens
acaaagggaggaggaagaagggagcggggtcggagccgtcggggccaaaggagacggggccaggaacaggcagtctcggcccaactgcggacgctccctccaccccctgcgcaaaaagacccaaccggagttgaggcgctgcccctgaaggccccaccttacacttggcgggggccggagccaggctcccaggactgctccagaaccgagggaagctcgggtccctccaagctagccatggtgaggcgccggaggccccggggccccacccccccggcctgaccacactgccctgggtgccctcctccagaagcccgagatgcggggggccgggagacaacactcctggctccccagagaggcgtgggtctggggctgagggccagggcccggatgcccaggttccgggactagggccttggcagccagcgggggtggggaccacgggcacccagagaaggtcctccacacatcccagcgccggctcccggccatggagcccttgaagagcctcttcctcaagagccctctagggtcatggaatggcagtggcagcgggggtggtgggggcggtggaggaggccggcctgaggggtctccaaaggcagcgggttatgccaacccggtgtggacagccctgttcgactacgagcccagtgggcaggatgagctggccctgaggaagggtgaccgtgtggaggtgctgtcccgggacgcagccatctcaggagacgagggctggtgggcgggccaggtgggtggccaggtgggcatcttcccgtccaactatgtgtctcggggtggcggcccgcccccctgcgaggtggccagcttccaggagctgcggctggaggaggtgatcggcattggaggctttggcaaggtgtacaggggcagctggcgaggtgagctggtggctgtgaaggcagctcgccaggaccccgatgaggacatcagtgtgacagccgagagcgttcgccaggaggcccggctcttcgccatgctggcacaccccaacatcattgccctcaaggctgtgtgcctggaggagcccaacctgtgcctggtgatggagtatgcagccggtgggcccctcagccgagctctggccgggcggcgcgtgcctccccatgtgctggtcaactgggctgtgcagattgcccgtgggatgcactacctgcactgcgaggccctggtgcccgtcatccaccgtgatctcaagtccaacaacattttgctgctgcagcccattgagagtgacgacatggagcacaagaccctgaagatcaccgactttggcctggcccgagagtggcacaaaaccacacaaatgagtgccgcgggcacctacgcctggatggctcctgaggttatcaaggcctccaccttctctaagggcagtgacgtctggagttttggggtgctgctgtgggaactgctgaccggggaggtgccataccgtggcattgactgccttgctgtggcctatggcgtagctgttaacaagctcacactgcccatcccatccacctgccccgagcccttcgcacagcttatggccgactgctgggcgcaggacccccaccgcaggcccgacttcgcctccatcctgcagcagttggaggcgctggaggcacaggtcctacgggaaatgccgcgggactccttccattccatgcaggaaggctggaagcgcgagatccagggtctcttcgacgagctgcgagccaaggaaaaggaactactgagccgcgaggaggagctgacgcgagcggcgcgcgagcagcggtcacaggcggagcagctgcggcggcgcgagcacctgctggcccagtgggagctagaggtgttcgagcgcgagctgacgctgctgctgcagcaggtggaccgcgagcgaccgcacgtgcgccgccgccgcgggacattcaagcgcagcaagctccgggcgcgcgacggcggcgagcgtatcagcatgccactcgacttcaagcaccgcatcaccgtgcaggcctcacccggccttgaccggaggagaaacgtcttcgaggtcgggcctggggattcgcccacctttccccggttccgagccatccagttggagcctgcagagccaggccaggcatggggccgccagtccccccgacgtctggaggactcaagcaatggagagcggcgagcatgctgggcttggggtcccagttcccccaagcctggggaagcccagaatgggaggagaaggtcccgcatggacgaagccacatggtacctggattcagatgactcatcccccttaggatctccttccacacccccagcactcaatggtaaccccccgcggcctagcctggagcccgaggagcccaagaggcctgtccccgcagagcgcggtagcagctctgggacgcccaagctgatccagcgggcgctgctgcgcggcaccgccctgctcgcctcgctgggccttggccgcgacctgcagccgccgggaggcccaggacgcgagcgcggggagtccccgacaacaccccccacgccaacgcccgcgccctgcccgaccgagccgcccccttccccgctcatctgcttctcgctcaagacgcccgactccccgcccactcctgcacccctgttgctggacctgggtatccctgtgggccagcggtcagccaagagcccccgacgtgaggaggagccccgcggaggcactgtctcacccccaccggggacatcacgctctgctcctggcaccccaggcaccccacgttcaccacccctgggcctcatcagccgacctcggccctcgccccttcgcagccgcattgatccctggagctttgtgtcagctgggccacggccttctcccctgccatcaccacagcctgcaccccgccgagcaccctggaccttgttcccggactcagaccccttctgggactccccacctgccaaccccttccaggggggcccccaggactgcagggcacagaccaaagacatgggtgcccaggccccgtgggtgccggaagcggggccttgagtgggccaggccactcccccgagctccagctgccttaggaggagtcacagcatacactggaacaggagctgggtcagcctctgcagctgcctcagtttccccagggaccccacccccctttgggggtcaggaacactacactgcacaggaagccttcacactggaagggggacctgcgcccccacatctgaaacctgtaggtccccccagctcacctgccctactggggcccaacactgtacccagctggttgggaggaccagagcctgtctcagggaattgcctgctggggtgatgcagggaggaggggaggtgcagggaagaggggccggcctcagctgtcaccagcacttttgaccaagtcctgctactgcggcccctgccctagggcttagagcatggacctcctgccctgggggtcatctggggccagggctctctggatgccttcctgctgccccagccagggttggagtcttagcctcgggatccagtgaagccagaagccaaataaactcaaaagctgtctccccacaa

SEQ ID NO: 165 - DNA, 2912 bp, Homo sapiens
tccctccttttctttccaagtcacaaaattctcccctcccctaccccggagtttacggccctcctcctgtttccgatttcagcccggaaccggaagtgtagtgggcggggcccgtcggcggaaaacgcagcggagccagagccggacacggctgtggccgctgcctctacccccgccacggatcgccgggtagtaggactgcgcggctccaggctgagggtcggtccggaggcgggtgggcgcgggtctcacccggattgtccgggtggcaccgttcccggccccaccgggcgccgcgagggatcatgtctacagcctctgccgcctcctcctcctcctcgtcttcggccggtgagatgatcgaagccccttcccaggtcctcaactttgaagagatcgactacaaggagatcgaggtggaagaggttgttggaagaggagcctttggagttgtttgcaaagctaagtggagagcaaaagatgttgctattaaacaaatagaaagtgaatctgagaggaaagcgtttattgtagagcttcggcagttatcccgtgtgaaccatcctaatattgtaaagctttatggagcctgcttgaatccagtgtgtcttgtgatggaatatgctgaagggggctctttatataatgtgctgcatggtgctgaaccattgccatattatactgctgcccacgcaatgagttggtgtttacagtgttcccaaggagtggcttatcttcacagcatgcaacccaaagcgctaattcacagggacctgaaaccaccaaacttactgctggttgcaggggggacagttctaaaaatttgtgattttggtacagcctgtgacattcagacacacatgaccaataacaaggggagtgctgcttggatggcacctgaagtttttgaaggtagtaattacagtgaaaaatgtgacgtcttcagctggggtattattctttgggaagtgataacgcgtcggaaaccctttgatgagattggtggcccagctttccgaatcatgtgggctgttcataatggtactcgaccaccactgataaaaaatttacctaagcccattgagagcctgatgactcgttgttggtctaaagatccttcccagcgcccttcaatggaggaaattgtgaaaataatgactcacttgatgcggtactttccaggagcagatgagccattacagtatccttgtcagtattcagatgaaggacagagcaactctgccaccagtacaggctcattcatggacattgcttctacaaatacgagtaacaaaagtgacactaatatggagcaagttcctgccacaaatgatactattaagcgcttagaatcaaaattgttgaaaaatcaggcaaagcaacagagtgaatctggacgtttaagcttgggagcctcccgtgggagcagtgtggagagcttgcccccaacctctgagggcaagaggatgagtgctgacatgtctgaaatagaagctaggatcgccgcaaccacaggcaacggacagccaagacgtagatccatccaagacttgactgtaactggaacagaacctggtcaggtgagcagtaggtcatccagtcccagtgtcagaatgattactacctcaggaccaacctcagaaaagccaactcgaagtcatccatggacccctgatgattccacagataccaatggatcagataactccatcccaatggcttatcttacactggatcaccaactacagcctctagcaccgtgcccaaactccaaagaatctatggcagtgtttgaacagcattgtaaaatggcacaagaatatatgaaagttcaaacagaaattgcattgttattacagagaaagcaagaactagttgcagaactggaccaggatgaaaaggaccagcaaaatacatctcgcctggtacaggaacataaaaagcttttagatgaaaacaaaagcctttctacttactaccagcaatgcaaaaaacaactagaggtcatcagaagtcagcagcagaaacgacaaggcacttcatgattctctgggaccgttacattttgaaatatgcaaagaaagactttttttttaaggaaaggaaaaccttataatgacgattcatgagtgttagctttttggcgtgttctgaatgccaactgcctatatttgctgcatttttttcattgtttattttccttttctcatggtggacatacaattttactgtttcattgcataacatggtagcatctgtgacttgaatgagcagcactttgcaacttcaaaacagatgcagtgaactgtggctgtatatgcatgctcattgtgtgaaggctagcctaacagaacaggaggtatcaaactagctgctatgtgcaaacagcgtccattttttcatattagaggtggaacctcaagaatgactttattcttgtatctcatctcaaaatattaataatttttttcccaaaagatggtatataccaagttaaagacagggtattataaatttagagtgattggtggtatattacggaaatacggaacctttagggatagttccgtgtaagggctttgatgccagcatccttggatcagtactgaactcagttccatccgtaaaatatgtaaaggtaagtggcagctgctctatttaatgaaagcagttttaccggattttgttagactaaaatttgattgtgatacattgaacaaaatggaactcatttttttttaaggagtaaagatttttaattctgtgattgtgtgtatgtgtgttgaaactgtaaagcttttatgactctaatattaatctcttaaatgaaattaaaaggcaaaagaacatgattgagcttaaatgatcatttcttcctgcagtgattcttggattgttttctcatgtatttg

SEQ ID NO: 166 - DNA, 1994 bp, Homo sapiens
actcgctgctctgcggggaggcgggcgctcccgcaggggttcctccaagatggcggcgcagaggaggagcttgctgcagagtgagcagcagccaagctggacagatgacctgcctctctgccacctctctggggttggctcagcctccaaccgcagctactctgctgatggcaagggcactgagagccacccgccagaggacagctggctcaagttcaggagtgagaacaactgcttcctgtatggggtcttcaacggctatgatggcaaccgagtgaccaacttcgtggcccagcggctgtccgcagagctcctgctgggccagctgaatgccgagcacgccgaggccgatgtgcggcgtgtgctgctgcaggccttcgatgtggtggagaggagcttcctggagtccattgacgacgccttggctgagaaggcaagcctccagtcgcaattgccagagggagtccctcagcaccagctgcctcctcagtatcagaagatccttgagagactcaagacgttagagagggaaatttcgggaggggccatggccgttgtggcggtccttctcaacaacaagctctacgtcgccaatgtcggtacaaaccgtgcacttttatgcaaatcgacagtggatgggttgcaggtgacacagctgaacgtggaccacaccacagagaacgaggatgagctcttccgtctttcgcagctgggcttggatgctggaaagatcaagcaggtggggatcatctgtgggcaggagagcacccggcggatcggggattacaaggttaaatatggctacacggacattgaccttctcagcgctgccaagtccaaaccaatcatcgcagagccagaaatccatggggcacagccgctggatggggtgacgggcttcttggtgctgatgtcggaggggttgtacaaggccctagaggcagcccatgggcctgggcaggccaaccaggagattgctgcgatgattgacactgagtttgccaagcagacctccctggacgcagtggcccaggccgtcgtggaccgggtgaagcgcatccacagcgacaccttcgccagtggtggggagcgtgccaggttctgcccccggcacgaggacatgaccctgctagtgaggaactttggctacccgctgggcgaaatgagccagcccacaccgagcccagccccagctgcaggaggacgagtgtaccctgtgtctgtgccatactccagcgcccagagcaccagcaagaccagcgtgaccctctcccttgtcatgccctcccagggccagatggtcaacggggctcacagtgcttccaccctggacgaagccacccccaccctcaccaaagacccttccaggcctgcaagcgatttgacagccatccctcagtgccaactaaacctcctgggcagcctgaccccagggtaggaaggaagcgcctacaccaaggggccctctgggagctgagatcatcctggggttttgtcgcctggtctgacttgtgcactgggatcttctcgtgccaggccaggccccgccccctccccgggactgggcagaccccctccctcatgcatctgtgtccactgaggcttccctcacctagaatggcccatccttcaggacccagctcactctcatcttctttccagggacttatcccccaaggctgtcctctgttctggtgagctcagggctcttggaacttggtctgcagtgactctggggttcctggttaggacccatgttctctaggtcccagcaccctgcacggggcagtgtttgtgacactgggcccagctattctgagagaaggactccaaccttccatcaggtgtggcccgagatgtgggtggccctgggcatggggcatggatgcattgtgactttcatgggcctcttctgcaaaaaaaaaattaaaattatactttatgactattggtagaaagataaatatattaatacattaaaatttctctttgag

SEQ ID NO: 167 - DNA, 2786 bp, Homo sapiens
gcggaggcaaggcgggtgcagggcttctggggacggagggaggtgccagaagttgagccctgaggccctgctggcccctgggcgcaggcccagctcaggcccccagggatggacgtcgtggaccctgacattttcaatagagacccccgggaccactatgacctgctacagcggctgggtggcggcacgtatggggaagtctttaaggctcgagacaaggtgtcaggggacctggtggcactgaagatggtgaagatggagcctgatgatgatgtctccacccttcagaaggaaatcctcatattgaaaacttgccggcacgccaacatcgtggcctaccatgggagttatctctggttgcagaaactctggatctgcatggaattctgtggggctggttctctccaggacatctaccaagtgacaggctccctgtcagagctccagattagctatgtctgccgggaagtgctccagggactggcctatttgcactcacagaagaagatacacagggacatcaagggagctaacatcctcatcaatgatgctggggaggtcagattggctgactttggcatctcggcccagattggggctacactggccagacgcctctctttcattgggacaccctactggatggctccggaagtggcagctgtggccctgaagggaggatacaatgagctgtgtgacatctggtccctgggcatcacggccatcgaactggccgagctacagccaccgctctttgatgtgcaccctctcagagttctcttcctcatgaccaagagtggctaccagcctccccgactgaaggaaaaaggcaaatggtcggctgccttccacaacttcatcaaagtcactctgactaagagtcccaagaaacgacccagcgccaccaagatgctcagtcatcaactggtatcccagcctgggctgaatcgaggcctgatcctggatcttcttgacaaactgaagaatcccgggaaaggaccctccattggggacattgaggatgaggagcccgagctaccccctgctatccctcggcggatcagatccacccaccgctccagctctctggggatcccagatgcagactgctgtcggcggcacatggagttcaggaagctccgaggaatggagaccagacccccagccaacaccgctcgcctacagcctcctcgagacctcaggagcagcagccccaggaagcaactgtcagagtcgtctgacgatgactatgacgacgtggacatccccacccctgcagaggacacacctcctccacttccccccaagcccaagttccgttctccatcagacgagggtcctgggagcatgggggatgatgggcagctgagcccgggggtgctggtccggtgtgccagtgggcccccaccaaacagcccccgtcctgggcctcccccatccaccagcagcccccacctcaccgcccattcagaaccctcactctggaacccaccctcccgggagcttgacaagcccccacttctgccccccaagaaggaaaagatgaagagaaagggatgtgcccttctcgtaaagttgttcaatggctgccccctccggatccacagcacggccgcctggacacatccctccaccaaggaccagcacctgctcctgggggcagaggaaggcatcttcatcctgaaccggaatgaccaggaggccacgctggaaatgctctttcctagccggactacgtgggtgtactccatcaacaacgttctcatgtctctctcaggaaagaccccccacctgtattctcatagcatccttggcctgctggaacggaaagagaccagagcaggaaaccccatcgctcacattagcccccaccgcctactggcaaggaagaacatggtttccaccaagatccaggacaccaaaggctgccgggcgtgctgtgtggcggagggtgcgagctctgggggcccgttcctgtgcggtgcattggagacgtccgttgtcctgcttcagtggtaccagcccatgaacaaattcctgcttgtccggcaggtgctgttcccactgccgacgcctctgtccgtgttcgcgctgctgaccgggccaggctctgagctgcccgctgtgtgcatcggcgtgagccccgggcggccggggaagtcggtgctcttccacacggtgcgctttggcgcgctctcttgctggctgggcgagatgagcaccgagcacaggggacccgtgcaggtgacccaggtagaggaagatatggtgatggtgttgatggatggctctgtgaagctggtgaccccggaggggtccccagtccggggacttcgcacacctgagatccccatgaccgaagcggtggaggccgtggctatggttggaggtcagcttcaggccttctggaagcatggagtgcaggtgtgggctctaggctcggatcagctgctacaggagctgagagaccctaccctcactttccgtctgcttggctcccccaggctggagtgcagtggcacgatctcgcctcactgcaacctcctcctcccaggttcaagcaattctcctgcctcagcctcccgagtagctgggattacaggcctgtagtggtggagacacgcccagtggatgatcctactgctcccagcaacctctacatccaggaatgagtccctaggggggtgtcaggaactagtccttgcaccccctcccccatagacacactagtggtcatggcatgtcctcatctcccaataaacatgactttagcctctgcaaaaaaa

SEQ ID NO: 168 - DNA, 5916 bp, Homo sapiens
gcccctccctccgcccgcccgccggcccgcccgtcagtctggcaggcaggcaggcaatcggtccgagtggctgtcggctcttcagctctcccgctcggcgtcttccttcctcctcccggtcagcgtcggcggctgcaccggcggcggcgcagtccctgcgggaggggcgacaagagctgagcggcggccgccgagcgtcgagctcagcgcggcggaggcggcggcggcccggcagccaacatggcggcggcggcggcggcgggcgcgggcccggagatggtccgcgggcaggtgttcgacgtggggccgcgctacaccaacctctcgtacatcggcgagggcgcctacggcatggtgtgctctgcttatgataatgtcaacaaagttcgagtagctatcaagaaaatcagcccctttgagcaccagacctactgccagagaaccctgagggagataaaaatcttactgcgcttcagacatgagaacatcattggaatcaatgacattattcgagcaccaaccatcgagcaaatgaaagatgtatatatagtacaggacctcatggaaacagatctttacaagctcttgaagacacaacacctcagcaatgaccatatctgctattttctctaccagatcctcagagggttaaaatatatccattcagctaacgttctgcaccgtgacctcaagccttccaacctgctgctcaacaccacctgtgatctcaagatctgtgactttggcctggcccgtgttgcagatccagaccatgatcacacagggttcctgacagaatatgtggccacacgttggtacagggctccagaaattatgttgaattccaagggctacaccaagtccattgatatttggtctgtaggctgcattctggcagaaatgctttctaacaggcccatctttccagggaagcattatcttgaccagctgaaccacattttgggtattcttggatccccatcacaagaagacctgaattgtataataaatttaaaagctaggaactatttgctttctcttccacacaaaaataaggtgccatggaacaggctgttcccaaatgctgactccaaagctctggacttattggacaaaatgttgacattcaacccacacaagaggattgaagtagaacaggctctggcccacccatatctggagcagtattacgacccgagtgacgagcccatcgccgaagcaccattcaagttcgacatggaattggatgacttgcctaaggaaaagctcaaagaactaatttttgaagagactgctagattccagccaggatacagatcttaaatttgtcaggacaagggctcagaggactggacgtgctcagacatcggtgttcttcttcccagttcttgacccctggtcctgtctccagcccgtcttggcttatccactttgactcctttgagccgtttggaggggcggtttctggtagttgtggcttttatgctttcaaagaatttcttcagtccagagaattcctcctggcagccctgtgtgtgtcacccattggtgacctgcggcagtatgtacttcagtgcacctactgcttactgttgctttagtcactaattgctttctggtttgaaagatgcagtggttcctccctctcctgaatccttttctacatgatgccctgctgaccatgcagccgcaccagagagagattcttccccaattggctctagtcactggcatctcactttatgatagggaaggctactacctagggcactttaagtcagtgacagccccttatttgcacttcaccttttgaccataactgtttccccagagcaggagcttgtggaaataccttggctgatgttgcagcctgcagcaagtgcttccgtctccggaatccttggggagcacttgtccacgtcttttctcatatcatggtagtcactaacatatataaggtatgtgctattggcccagcttttagaaaatgcagtcatttttctaaataaaaaggaagtactgcacccagcagtgtcactctgtagttactgtggtcacttgtaccatatagaggtgtaacacttgtcaagaagcgttatgtgcagtacttaatgtttgtaagacttacaaaaaaagatttaaagtggcagcttcactcgacatttggtgagagaagtacaaaggttgcagtgctgagctgtgggcggtttctggggatgtcccagggtggaactccacatgctggtgcatatacgcccttgagctacttcaaatgtgggtgtttcagtaaccacgttccatgcctgaggatttagcagagaggaacactgcgtctttaaatgagaaagtatacaattctttttccttctacagcatgtcagcatctcaagttcatttttcaacctacagtataacaatttgtaataaagcctccaggagctcatgacgtgaagcactgttctgtcctcaagtactcaaatatttctgatactgctgagtcagactgtcagaaaaagctagcactaactcgtgtttggagctctatccatattttactgatctctttaagtatttgttcctgccactgtgtactgtggagttgactcggtgttctgtcccagtgcggtgcctcctcttgacttccccactgctctctgtggtgagaaatttgccttgttcaataattactgtaccctcgcatgactgttacagctttctgtgcagagatgactgtccaagtgccacatgcctacgattgaaatgaaaactctattgttacctctgagttgtgttccacggaaaatgctatccagcagatcatttaggaaaaataattctatttttagcttttcatttctcagctgtccttttttcttgtttgatttttgacagcaatggagaatgggttatataaagactgcctgctaatatgaacagaaatgcatttgtaattcatgaaaataaatgtacatcttctatcttcacattcatgttaagattcagtgttgctttcctctggatcagcgtgtctgaatggacagtcaggttcaggttgtgctgaacacagaaatgctcacaggcctcactttgccgcccaggcactggcccagcacttggatttacataagatgagttagaaaggtacttctgtagggtcctttttacctctgctcggcagagaatcgatgctgtcatgttcctttattcacaatcttaggtctcaaatattctgtcaaaccctaacaaagaagccccgacatctcaggttggattccctggttctctctaaagagggcctgcccttgtgccccagaggtgctgctgggcacagccaagagttgggaagggccgccccacagtacgcagtcctcaccacccagcccagggtgctcacgctcaccactcctgtggctgaggaaggatagctggctcatcctcggaaaacagacccacatctctattcttgccctgaaatacgcgcttttcacttgcgtgctcagagctgccgtctgaaggtccacacagcattgacgggacacagaaatgtgactgttaccggataacactgattagtcagttttcatttataaaaaagcattgacagttttattactcttgtttctttttaaatggaaagttactattataaggttaatttggagtcctcttctaaatagaaaaccatatccttggctactaacatctggagactgtgagctccttcccattccccttcctggtactgtggagtcagattggcatgaaaccactaacttcattctagaatcattgtagccataagttgtgtgctttttattaatcatgccaaacataatgtaactgggcagagaatggtcctaaccaaggtacctatgaaaagcgctagctatcatgtgtagtagatgcatcattttggctcttcttacatttgtaaaaatgtacagattaggtcatcttaattcatattagtgacacggaacagcacctccactatttgtatgttcaaataagctttcagactaatagcttttttggtgtctaaaatgtaagcaaaaaattcctgctgaaacattccagtcctttcatttagtataaaagaaatactgaacaagccagtgggatggaattgaaagaactaatcatgaggactctgtcctgacacaggtcctcaaagctagcagagatacgcagacattgtggcatctgggtagaagaatactgtattgtgtgtgcagtgcacagtgtgtggtgtgtgcacactcattccttctgctcttgggcacaggcagtgggtgtagaggtaaccagtagctttgagaagctacatgtagctcaccagtggttttctctaaggaatcacaaaagtaaactacccaaccacatgccacgtaatatttcagccattcagaggaaactgttttctctttatttgcttatatgttaatatggtttttaaattggtaacttttatatagtatggtaacagtatgttaatacacacatacatacgcacacatgctttgggtccttccataatacttttatatttgtaaatcaatgttttggagcaatcccaagtttaagggaaatatttttgtaaatgtaatggttttgaaaatctgagcaatccttttgcttatacatttttaaagcatttgtgctttaaaattgttatgctggtgtttgaaacatgatactcctgtggtgcagatgagaagctataacagtgaatatgtggtttctcttacgtcatccaccttgacatgatgggtcagaaacaaatggaaatccagagcaagtcctccagggttgcaccaggtttacctaaagcttgttgccttttcttgtgctgtttatgcgtgtagagcactcaagaaagttctgaaactgctttgtatctgctttgtactgttggtgccttcttggtattgtaccccaaaattctgcatagattatttagtataatggtaagttaaaaaatgttaaaggaagattttattaagaatctgaatgtttattcattatattgttacaatttaacattaacatttatttgtggtatttgtgatttggttaatctgtataaaaattgtaagtagaaaggtttatatttcatcttaattcttttgatgttgtaaacgtactttttaaaagatggattatttgaatgtttatggcacctgacttgtaaaaaaaaaaaactacaaaaaaatccttagaatcattaaattgtgtccctgtattaccaaaataacacagcaccgtgcatgtatagtttaattgcagtttcatctgtgaaaacgtgaaattgtctagtccttcgttatgttccccagatgtcttccagatttgctctgcatgtggtaacttgtgttagggctgtgagctgttcctcgagttgaatggggatgtcagtgctcctagggttctccaggtggttcttcagaccttcacctgtgggggggggggtaggcggtgcccacgcccatctcctcatcctcctgaacttctgcaaccccactgctgggcagacatcctgggcaaccccttttttcagagcaagaagtcataaagataggatttcttggacatttggttcttatcaatattgggcattatgtaatgacttatttacaaaacaaagatactggaaaatgttttggatgtggtgttatggaaagagcacaggccttggacccatccagctgggttcagaactaccccctgcttataactgcggctggctgtgggccagtcattctgcgtctctgctttcttcctctgcttcagactgtcagctgtaaagtggaagcaatattacttgccttgtatatggtaaagattataaaaatacatttcaactgttcagcatagtacttcaaagcaagtactcagtaaatagcaagtctttttaaa

SEQ ID NO: 169 - DNA, 2372 bp, Homo sapiens
gagaaatggcgtggcaggggacccagcgagcccagagggattttgccgctgcttcctctacccctgtatttcacgcagctctctaaattgactcagctccaggctagtgtgagaaacaccaacagcaggcccatctcagatcttcactatggcaacttatgcaagaaactgttgaattagacccgtttcctatagatgagaaaccatacaagctgtggtatttatgagcctccatttcttatactactgcagtgaaccaacattggatgtgaaaattgccttttgtcagggattcgataaacaagtggatgtgtcatatattgccaaacattacaacatgagcaaaagcaaagttgacaaccagttctacagtgtggaagtgggagactcaaccttcacagttctcaagcgctaccagaatctaaagcctattggctctggggctcagggcatagtttgtgccgcgtatgatgctgtccttgacagaaatgtggccattaagaagctcagcagaccctttcagaaccaaacacatgccaagagagcgtaccgggagctggtcctcatgaagtgtgtgaaccataaaaacattattagtttattaaatgtcttcacaccccagaaaacgctggaggagttccaagatgtttacttagtaatggaactgatggatgccaacttatgtcaagtgattcagatggaattagaccatgagcgaatgtcttacctgctgtaccaaatgttgtgtggcattaagcacctccattctgctggaattattcacagggatttaaaaccaagtaacattgtagtcaagtctgattgcacattgaaaatcctggactttggactggccaggacagcaggcacaagcttcatgatgactccatatgtggtgacacgttattacagagcccctgaggtcatcctggggatgggctacaaggagaacgtggatatatggtctgtgggatgcattatgggagaaatggttcgccacaaaatcctctttccaggaagggactatattgaccagtggaataaggtaattgaacaactaggaacaccatgtccagaattcatgaagaaattgcaacccacagtaagaaactatgtggagaatcggcccaagtatgcgggactcaccttccccaaactcttcccagattccctcttcccagcggactccgagcacaataaactcaaagccagccaagccagggacttgttgtcaaagatgctagtgattgacccagcaaaaagaatatcagtggacgacgccttacagcatccctacatcaacgtctggtatgacccagccgaagtggaggcgcctccacctcagatatatgacaagcagttggatgaaagagaacacacaattgaagaatggaaagaacttatctacaaggaagtaatgaattcagaagaaaagactaaaaatggtgtagtaaaaggacagccttctccttcagcacaggtgcagcagtgaacagcagtgagagtctccctccatcctcgtctgtcaatgacatctcctccatgtccaccgaccagaccctggcatctgacactgacagcagcctggaagcctcggcaggacccctgggttgttgcaggtgactagccgcctgcctgcgaaacccagcgttcttcaggagatgatgtgatggaacacacacacacgcagacacacacacacacacaaatgcagacacacaacatcaagaaaacagcaagggagagaatccaagcctaaaattaaataaatctttcagcctgcttcttccccagggttctgtattgcagctaagctcaaatgtatatttaacttctagttgctcttgctttggtcttcttccaatgatgcttactacagaaagcaaatcagacacaattagagaagccttttccataaagtgtaattttaatggctgcaaaaccggcaacctgtaactgcccttttaaatggcatgacaaggtgtgcagtggccccatccagcatgtgtgtgtctctatcttgcatctacctgctccttggcctagtcagatggatgtagatacagatccgcatgtgtctgtattcatacagcactacttacttagagatgctactgtcagtgtcctcagggctctaccaagacataatgcactggggtaccacatggtccatttcatgtgatctattactctgacataaacccatctgtaatatattgccagtatataagctgtttagtttgttaattgattaaactgtatgtcttataagaaaacatgtaaagggggaatatatggggggagtgagctctctcagacccttgaagatgtagcttccaaatttgaatggattaaatggcacctgtatacca

SEQ ID NO: 170 - DNA, 2420 bp, Homo sapiens
tcgggcgcgggcgcggggcgcggggctgggcccgggcggagcggcggctgctccggacatgtcgggccctcgcgccggcttctaccggcaggagctgaacaagaccgtgtgggaggtgccgcagcggctgcaggggctgcgcccggtgggctccggcgcctacggctccgtctgttcggcctacgacgcccggctgcgccagaaggtggcggtgaagaagctgtcgcgccccttccagtcgctgatccacgcgcgcagaacgtaccgggagctgcggctgctcaagcacctgaagcacgagaacgtcatcgggcttctggacgtcttcacgccggccacgtccatcgaggacttcagcgaagtgtacttggtgaccaccctgatgggcgccgacctgaacaacatcgtcaagtgccaggcgctgagcgacgagcacgttcaattcctggtttaccagctgctgcgcgggctgaagtacatccactcggccgggatcatccaccgggacctgaagcccagcaacgtggctgtgaacgaggactgtgagctcaggatcctggatttcgggctggcgcgccaggcggacgaggagatgaccggctatgtggccacgcgctggtaccgggcacctgagatcatgctcaactggatgcattacaaccaaacagtggatatctggtccgtgggctgcatcatggctgagctgctccagggcaaggccctcttcccgggaagcgactacattgaccagctgaagcgcatcatggaagtggtgggcacacccagccctgaggttctggcaaaaatctcctcagaacacgcccggacatatatccagtccctgccccccatgccccagaaggacctgagcagcatcttccgtggagccaaccccctggccatagacctccttggaaggatgctggtgctggacagtgaccagagggtcagtgcagctgaggcactggcccacgcctacttcagccagtaccacgaccccgaggatgagccagaggccgagccatatgatgagagcgttgaggccaaggagcgcacgctggaggagtggaaggagctcacttaccaggaagtcctcagcttcaagcccccagagccaccgaagccacctggcagcctggagattgagcagtgaggtgctgcccagcagcccctgagagcctgtggaggggcttgggcctgcacccttccacagctggcctggtttcctcgagaggcacctcccacactcctatggtcacagacttctggcctaggacccctcgccttcaggagaatctacacgcatgtatgcatgcacaaacatgtgtgtacatgtgcttgccatgtgtaggagtctgggcacaagtgtccctgggcctaccttggtcctcctgtcctcttctggctactgcactctccactgggacctgactgtggggtcctagatgccaaaggggttcccctgcggagttcccctgtctgtcccaggccgacccaagggagtgtcagccttgggctctcttctgtcccagggctttctggaggacgcgctggggccgggaccccgggagactcaaagggagaggtctcagtggttagagctgctcagcctggaggtagggggctgtcttggtcactgctgagacccacaggtctaagaggagaggcagagccagtgtgccaccaggctgggcagggacaaccaccaggtgtcaaatgagaaaagctgcctggagtcttgtgttcacccgtgggtgtgtgtgggcacgtgtggatgagcgtgcactccccgtgttcatatgtcagggcacatgtgatgtggtgcgtgtgaatctgtgggcgcccaaggccagcagccatatctggcaagaagctggagccggggtgggtgtgctgttgccttccctctcctcggttcctgatgccttgaggggtgtttcagactggcggctccagtgggccaaagggcaaccacatgagcatgggcaggggctttctccttggatgtgggacccacagcagcttcctgaggctgggggtgggtgggtgggtggtttggccttgaggacgctagggcaggcagcacacctggatgtggacttggactcggacacttctgccctgcaccctggcccgctctctacctctgcccaccgttgtggccctgcagccggagatctgaggtgctctggtctgtgggtcagtcctctttccttgtcccaggatggagctgatccagtaacctcggagacgggaccctgcccagagctgagttgggggtgtggctctgccctggaaagggggtgacctcttgcctcgaggggcccagggaagcctgggtgtcaagtgcctgcaccaggggtgcacaataaagggggttctctctcaaaaaaaaaaaaaaaaaaaaaaaaaaaaaaaaa

SEQ ID NO: 171 - DNA, 1778 bp, Homo sapiens
gggagcgggagcgccccagcggccggcgggcgggcgggcgagcggacgagcggcgcggagccggcccgaggcgcgcgccgagggagccccgtccccggtcgtgggggcaccgcccgcaggctctgcggggtgggcagctcccgggcctgccatgagctctccgccgcccgcccgcagtggcttttaccgccaggaggtgaccaagacggcctgggaggtgcgcgccgtgtaccgggacctgcagcccgtgggctcgggcgcctacggcgcggtgtgctcggccgtggacggccgcaccggcgctaaggtggccatcaagaagctgtatcggcccttccagtccgagctgttcgccaagcgcgcctaccgcgagctgcgcctgctcaagcacatgcgccacgagaacgtgatcgggctgctggacgtattcactcctgatgagaccctggatgacttcacggacttttacctggtgatgccgttcatgggcaccgacctgggcaagctcatgaaacatgagaagctaggcgaggaccggatccagttcctcgtgtaccagatgctgaaggggctgaggtatatccacgctgccggcatcatccacagagacctgaagcccggcaacctggctgtgaacgaagactgtgagctgaagatcctggacttcggcctggccaggcaggcagacagtgagatgactgggtacgtggtgacccggtggtaccgggctcccgaggtcatcttgaattggatgcgctacacgcagacggtggacatctggtctgtgggctgcatcatggcggagatgatcacaggcaagacgctgttcaagggcagcgaccacctggaccagctgaaggagatcatgaaggtgacggggacgcctccggctgagtttgtgcagcggctgcagagcgatgaggccaagaactacatgaagggcctccccgaattggagaagaaggattttgcctctatcctgaccaatgcaagccctctggctgtgaacctcctggagaagatgctggtgctggacgcggagcagcgggtgacggcaggcgaggcgctggcccatccctacttcgagtccctgcacgacacggaagatgagccccaggtccagaagtatgatgactcctttgacgacgttgaccgcacactggatgaatggaagcgtgttacttacaaagaggtgctcagcttcaagcctccccggcagctgggggccagggtctccaaggagacgcctctgtgaagatctctgggctccggggtggcagtgaggaccaccttcaccttccacctgagaggggactctcgttgccaccttgaccttggctggggcttgcatcccaaggcatccatcagagcagacgcccgggttccatggaccctcctccccacggccatgcctctgctcttgggcgcccatcatggaggagcacctgaactttctggacaagacctctggccgacctggggatggcctctgatccctggagcagtggcccacttgcccggtgctctcagaaacctcagagctggtggggctccagatcaggccttggcctctgagccctgcctgctctgggccatgcagaggaaggacagagggtgggcgcagggcaccaactcagggacatcccctctcctgggcgacgtcagtggaccttcctgcacccccagcctggaatgtaaatcagctgtgtggtgcccgcgtggctggaaggaaatagacccttttgtagctccctaaaaaaaaaaaaaaaaaaaaaaaa

SEQ ID NO: 172 - DNA, 1888 bp, Homo sapiens
gcggcgcggggcgggcgcagcgggggtcggggcgctgggagcccgttgggccgcgaacgcagccgccacgccggggccgccgagatcgggtgcccgggatgagcctcatccggaaaaagggcttctacaagcaggacgtcaacaagaccgcctgggagctgcccaagacctacgtgtccccgacgcacgtcggcagcggggcctatggctccgtgtgctcggccatcgacaagcggtcaggggagaaggtggccatcaagaagctgagccgaccctttcagtccgagatcttcgccaagcgcgcctaccgggagctgctgctgctgaagcacatgcagcatgagaacgtcattgggctcctggatgtcttcaccccagcctcctccctgcgcaacttctatgacttctacctggtgatgcccttcatgcagacggatctgcagaagatcatggggatggagttcagtgaggagaagatccagtacctggtgtatcagatgctcaaaggccttaagtacatccactctgctggggtcgtgcacagggacctgaagccaggcaacctggctgtgaatgaggactgtgaactgaagattctggattttgggctggcgcgacatgcagacgccgagatgactggctacgtggtgacccgctggtaccgagcccccgaggtgatcctcagctggatgcactacaaccagacagtggacatctggtctgtgggctgtatcatggcagagatgctgacagggaaaactctgttcaaggggaaagattacctggaccagctgacccagatcctgaaagtgaccggggtgcctggcacggagtttgtgcagaagctgaacgacaaagcggccaaatcctacatccagtccctgccacagacccccaggaaggatttcactcagctgttcccacgggccagcccccaggctgcggacctgctggagaagatgctggagctagacgtggacaagcgcctgacggccgcgcaggccctcacccatcccttctttgaacccttccgggaccctgaggaagagacggaggcccagcagccgtttgatgattccttagaacacgagaaactcacagtggatgaatggaagcagcacatctacaaggagattgtgaacttcagccccattgcccggaaggactcacggcgccggagtggcatgaagctgtagggactcatcttgcatggcaccaccggccagacactgcccaaggaccagtatttgtcactaccaaactcagcccttcttggaatacagcctttcaagcagaggacagaagggtccttctccttatgtgggaaatgggcctagtagatgcagaattcaaagatgtcggttgggagaaactagctctgatcctaacaggccacgttaaactgcccatctggagaatcgcctgcaggtggggccctttccttcccgccagagtggggctgagtgggcgctgagccaggccgggggcctatggcagtgatgctgtgttggtttcctagggatgctctaacgaattaccacaaacctggtggattgaaacagcagaacttgattcccttacagttctggaggctggaaatctgggatggaggtgttggcagggctgtggtccctttgaaggctctggggaagaatccttccttggctctttttagcttgtggcggcagtgggcagtccgtggcattccccagcttattgctgcatcactccagtctctgtctcttctgttctctcctcttttaacaacagtcattggatttagggcccaccctaatcctgtgtgatcttatcttgatccttattaattaaacctgcaaatactctagttccaaataaagtcacattctcaggttccaggtggacatga

SEQ ID NO: 173 - DNA, 3757 bp, Homo sapiens
ggaaccgcgaccactggagccttagcgggcgcagcagctggaacgggagtactgcgacgcagcccggagtcggccttgtaggggcgaaggtgcagggagatcgcggcgggcgcagtcttgagcgccggagcgcgtccctgcccttagcggggcttgccccagtcgcaggggcacatccagccgctgcggctgacagcagccgcgcgcgcgggagtctgcggggtcgcggcagccgcacctgcgcgggcgaccagcgcaaggtccccgcccggctgggcgggcagcaagggccggggagagggtgcgggtgcaggcgggggccccacagggccaccttcttgcccggcggctgccgctggaaaatgtctcaggagaggcccacgttctaccggcaggagctgaacaagacaatctgggaggtgcccgagcgttaccagaacctgtctccagtgggctctggcgcctatggctctgtgtgtgctgcttttgacacaaaaacggggttacgtgtggcagtgaagaagctctccagaccatttcagtccatcattcatgcgaaaagaacctacagagaactgcggttacttaaacatatgaaacatgaaaatgtgattggtctgttggacgtttttacacctgcaaggtctctggaggaattcaatgatgtgtatctggtgacccatctcatgggggcagatctgaacaacattgtgaaatgtcagaagcttacagatgaccatgttcagttccttatctaccaaattctccgaggtctaaagtatatacattcagctgacataattcacagggacctaaaacctagtaatctagctgtgaatgaagactgtgagctgaagattctggattttggactggctcggcacacagatgatgaaatgacaggctacgtggccactaggtggtacagggctcctgagatcatgctgaactggatgcattacaaccagacagttgatatttggtcagtgggatgcataatggccgagctgttgactggaagaacattgtttcctggtacagaccatattaaccagcttcagcagattatgcgtctgacaggaacaccccccgcttatctcattaacaggatgccaagccatgaggcaagaaactatattcagtctttgactcagatgccgaagatgaactttgcgaatgtatttattggtgccaatcccctggctgtcgacttgctggagaagatgcttgtattggactcagataagagaattacagcggcccaagcccttgcacatgcctactttgctcagtaccacgatcctgatgatgaaccagtggccgatccttatgatcagtcctttgaaagcagggacctccttatagatgagtggaaaagcctgacctatgatgaagtcatcagctttgtgccaccaccccttgaccaagaagagatggagtcctgagcacctggtttctgttctgttgatcccacttcactgtgaggggaaggccttttcacgggaactctccaaatattattcaagtgcctcttgttgcagagatttcctccatggtggaagggggtgtgcgtgcgtgtgcgtgcgtgttagtgtgtgtgcatgtgtgtgtctgtctttgtgggagggtaagacaatatgaacaaactatgatcacagtgactttacaggaggttgtggatgctccagggcagcctccaccttgctcttctttctgagagttggctcaggcagacaagagctgctgtccttttaggaatatgttcaatgcaaagtaaaaaaatatgaattgtccccaatcccggtcatgcttttgccactttggcttctcctgtgaccccaccttgacggtggggcgtagacttgacaacatcccacagtggcacggagagaaggcccataccttctggttgcttcagacctgacaccgtccctcagtgatacgtacagccaaaaaggaccaactggcttctgtgcactagcctgtgattaacttgcttagtatggttctcagatcttgacagtatatttgaaactgtaaatatgtttgtgccttaaaaggagagaagaaagtgtagatagttaaaagactgcagctgctgaagttctgagccgggcaagtcgagagggctgttggacagctgcttgtgggcccggagtaatcaggcagccttcataggcggtcatgtgtgcatgtgagcacatgcgtatatgtgcgtctctctttctccctcacccccaggtgttgccatttctctgcttacccttcacctttggtgcagaggtttcttgaatatctgccccagtagtcagaagcaggttcttgatgtcatgtacttcctgtgtactctttatttctagcagagtgaggatgtgttttgcacgtcttgctatttgagcatgcacagctgcttgtcctgctctcttcaggaggccctggtgtcaggcaggtttgccagtgaagacttcttgggtagtttagatcccatgtcacctcagctgatattatggcaagtgatatcacctctcttcagcccctagtgctattctgtgttgaacacaattgatacttcaggtgcttttgatgtgaaaatcatgaaaagaggaacaggtggatgtatagcatttttattcatgccatctgttttcaaccaactatttttgaggaattatcatgggaaaagaccagggcttttcccaggaatatcccaaacttcggaaacaagttattctcttcactcccaataactaatgctaagaaatgctgaaaatcaaagtaaaaaattaaagcccataaggccagaaactccttttgctgtctttctctaaatatgattactttaaaataaaaaagtaacaaggtgtcttttccactcctatggaaaagggtcttcttggcagcttaacattgacttcttggtttggggagaaataaattttgtttcagaattttgtatattgtaggaatccctttgagaatgtgattccttttgatggggagaaagggcaaattattttaatattttgtattttcaactttataaagataaaatatcctcaggggtggagaagtgtcgttttcataacttgctgaatttcaggcattttgttctacatgaggactcatatatttaagccttttgtgtaataagaaagtataaagtcacttccagtgttggctgtgtgacagaatcttgtatttgggccaaggtgtttccatttctcaatcagtgcagtgatacatgtactccagagggacagggtggaccccctgagtcaactggagcaagaaggaaggaggcagactgatggcgattccctctcacccgggactctccccctttcaaggaaagtgaacctttaaagtaaaggcctcatctcctttattgcagttcaaatcctcaccatccacagcaagatgaattttatcagccatgtttggttgtaaatgctcgtgtgatttcctacagaaatactgctctgaatattttgtaataaaggtctttgcacatgtgaccacatacgtgttaggaggctgcatgctctggaagcctggactctaagctggagctcttggaagagctcttcggtttctgagcataatgctcccatctcctgatttctctgaacagaaaacaaaagagagaatgagggaaattgctattttatttgtattcatgaacttggctgtaatcagttatgccgtataggatgtcagacaataccactggttaaaataaagcctatttttcaaattt

SEQ ID NO: 174 - DNA, 2005 bp, Homo sapiens
ctggcgcgcgcggccctgcgggtgacaggcaggcgggaaggggcggggcctcgggcggggccgccgtggggaggagggcggtgggaggggaggagtggagatggcggcggcggcggctcaggggggcgggggcggggagccccgtagaaccgagggggtcggcccgggggtcccgggggaggtggagatggtgaaggggcagccgttcgacgtgggcccgcgctacacgcagttgcagtacatcggcgagggcgcgtacggcatggtcagctcggcctatgaccacgtgcgcaagactcgcgtggccatcaagaagatcagccccttcgaacatcagacctactgccagcgcacgctccgggagatccagatcctgctgcgcttccgccatgagaatgtcatcggcatccgagacattctgcgggcgtccaccctggaagccatgagagatgtctacattgtgcaggacctgatggagactgacctgtacaagttgctgaaaagccagcagctgagcaatgaccatatctgctacttcctctaccagatcctgcggggcctcaagtacatccactccgccaacgtgctccaccgagatctaaagccctccaacctgctcatcaacaccacctgcgaccttaagatttgtgatttcggcctggcccggattgccgatcctgagcatgaccacaccggcttcctgacggagtatgtggctacgcgctggtaccgggccccagagatcatgctgaactccaagggctataccaagtccatcgacatctggtctgtgggctgcattctggctgagatgctctctaaccggcccatcttccctggcaagcactacctggatcagctcaaccacattctgggcatcctgggctccccatcccaggaggacctgaattgtatcatcaacatgaaggcccgaaactacctacagtctctgccctccaagaccaaggtggcttgggccaagcttttccccaagtcagactccaaagcccttgacctgctggaccggatgttaacctttaaccccaataaacggatcacagtggaggaagcgctggctcacccctacctggagcagtactatgacccgacggatgaggtgggccagtccccagcagcagtggggctgggggcaggggagcaggggggcacgtaggcatcccccatgccaggcctgagccttgctgtctctaccaccccagccagtggccgaggagcccttcaccttcgccatggagctggatgacctacctaaggagcggctgaaggagctcatcttccaggagacagcacgcttccagcccggagtgctggaggccccctagcccagacagacatctctgcaccctggggcctggacctgcctcctgcctgcccctctcccgccagactgttagaaaatggacactgtgcccagcccggaccttggcagcccaggccggggtggagcatgggcctggccacctctctcctttgctgaggcctccagcttcaggcaggccaaggccttctcctccccacccgccctccccacggggcctcgggacctcaggtggccccagttcaatctcccgctgctgctgctgcgcccttaccttccccagcgtcccagtctctggcagttctggaatggaagggttctggctgccccaacctgctgaagggcagaggtggagggtggggggcgctgagtagggactcagggccatgcctgcccccctcatctcattcaaaccccaccctagtttccctgaaggaacattccttagtctcaagggctagcatccctgaggagccaggccgggccgaatcccctccctgtcaaagctgtcacttcgcgtgccctcgctgcttctgtgtgtggtgagcagaagtggagctggggggcgtggagagcccggcgcccctgccacctccctgacccgtctaatatataaatatagagatgtgtctatggctgaaaaaaaaaaaaaaaaaaaaaaaaaaa

SEQ ID NO: 175 - DNA, 1417 bp, Homo sapiens
attaattgcttgccatcatgagcagaagcaagcgtgacaacaatttttatagtgtagagattggagattctacattcacagtcctgaaacgatatcagaatttaaaacctataggctcaggagctcaaggaatagtatgcgcagcttatgatgccattcttgaaagaaatgttgcaatcaagaagctaagccgaccatttcagaatcagactcatgccaagcgggcctacagagagctagttcttatgaaatgtgttaatcacaaaaatataattggccttttgaatgttttcacaccacagaaatccctagaagaatttcaagatgtttacatagtcatggagctcatggatgcaaatctttgccaagtgattcagatggagctagatcatgaaagaatgtcctaccttctctatcagatgctgtgtggaatcaagcaccttcattctgctggaattattcatcgggacttaaagcccagtaatatagtagtaaaatctgattgcactttgaagattcttgacttcggtctggccaggactgcaggaacgagttttatgatgacgccttatgtagtgactcgctactacagagcacccgaggtcatccttggcatgggctacaaggaaaacgtggatttatggtctgtggggtgcattatgggagaaatggtttgccacaaaatcctctttccaggaagggactatattgatcagtggaataaagttattgaacagcttggaacaccatgtcctgaattcatgaagaaactgcaaccaacagtaaggacttacgttgaaaacagacctaaatatgctggatatagctttgagaaactcttccctgatgtccttttcccagctgactcagaacacaacaaacttaaagccagtcaggcaagggatttgttatccaaaatgctggtaatagatgcatctaaaaggatctctgtagatgaagctctccaacacccgtacatcaatgtctggtatgatccttctgaagcagaagctccaccaccaaagatccctgacaagcagttagatgaaagggaacacacaatagaagagtggaaagaattgatatataaggaagttatggacttggaggagagaaccaagaatggagttatacgggggcagccctctcctttagcacaggtgcagcagtgatcaatggctctcagcatccatcatcatcgtcgtctgtcaatgatgtgtcttcaatgtcaacagatccgactttggcctctgatacagacagcagtctagaagcagcagctgggcctctgggctgctgtagatgactacttgggccatcggggggtgggagggatggggagtcggttagtcattgatagaactactttgaaaacaattcagtggtcttatttttgggtgatttttcaaaaaatgta

SEQ ID NO: 176 - DNA, 1947 bp, Homo sapiens
agggatctgaaacttgcccacccttcgggatattgcaggacgctgcatcatgagcgacagtaaatgtgacagtcagttttatagtgtgcaagtggcagactcaaccttcactgtcctaaaacgttaccagcagctgaaaccaattggctctggggcccaagggattgtttgtgctgcatttgatacagttcttgggataaatgttgcagtcaagaaactaagccgtccttttcagaaccaaactcatgcaaagagagcttatcgtgaacttgtcctcttaaaatgtgtcaatcataaaaatataattagtttgttaaatgtgtttacaccacaaaaaactctagaagaatttcaagatgtgtatttggttatggaattaatggatgctaacttatgtcaggttattcacatggagctggatcatgaaagaatgtcctaccttctttaccagatgctttgtggtattaaacatctgcattcagctggtataattcatagagatttgaagcctagcaacattgttgtgaaatcagactgcaccctgaagatccttgactttggcctggcccggacagcgtgcactaacttcatgatgaccccttacgtggtgacacggtactaccgggcgcccgaagtcatcctgggtatgggctacaaagagaacgttgatatctggtcagtgggttgcatcatgggagagctggtgaaaggttgtgtgatattccaaggcactgaccatattgatcagtggaataaagttattgagcagctgggaacaccatcagcagagttcatgaagaaacttcagccaactgtgaggaattatgtcgaaaacagaccaaagtatcctggaatcaaatttgaagaactctttccagattggatattcccatcagaatctgagcgagacaaaataaaaacaagtcaagccagagatctgttatcaaaaatgttagtgattgatcctgacaagcggatctctgtagacgaagctctgcgtcacccatacatcactgtttggtatgaccccgccgaagcagaagccccaccacctcaaatttatgatgcccagttggaagaaagagaacatgcaattgaagaatggaaagagctaatttacaaagaagtcatggattgggaagaaagaagcaagaatggtgttgtaaaagatcagccttcagcacagatgcagcagtaagtagcaacgccactccttctcagtcttcatcgatcaatgacatttcatccatgtccactgagcagacgctggcctcagacacagacagcagtcttgatgcctcgacgggaccccttgaaggctgtcgatgataggttagaaatagcaaacctgtcagcattgaaggaactctcacctccgtgggcctgaaatgcttgggagttgatggaaccaaatagaaaaactccatgttctgcatgtaagaaacacaatgccttgccctattcagacctgataggattgcctgcttagatgataaaatgaggcagaatatgtctgaagaaaaaaattgcaagccacacttctagagattttgttcaagatcatttcaggtgagcagttagagtaggtgaatttgtttcaaattgtactagtgacagtttctcatcatctgtaactgttgagatgtatgtgcatgtgaccacaaatgcttgcttggacttgcccatctagcactttggaaatcagtatttaaatgccaaataatcttccaggtagtgctgcttctgaagttatctcttaatcctcttaagtaatttggtgtctgtccagaaaaagtcgatttatgtgtattaattggccatcatgatgttatcatatcttattcccttttatgctatgatttattctatcttttgtatttcagaagacatataattaaatctatttaataaataaaaatatatagctttaaaaaaaaaaaaaaaaaa

SEQ ID NO: 177 - DNA, 2579 bp, Homo sapiens
aagccccgcccggccgggctccgcgccttcccttccctcccttcctccaagcttctcggttccctcccccgagataccggcgccatgtccagcgctcggacccccctacccacgctgaacgagagggacacggagcagcccaccttgggacaccttgactccaagcccagcagtaagtccaacatgattcggggccgcaactcagccacctctgctgatgagcagccccacattggaaactaccggctcctcaagaccattggcaagggtaattttgccaaggtgaagttggcccgacacatcctgactgggaaagaggtagctgtgaagatcattgacaagactcaactgaactcctccagcctccagaaactattccgcgaagtaagaataatgaaggttttgaatcatcccaacatagttaaattatttgaagtgattgagactgagaaaacgctctaccttgtcatggagtacgctagtggcggagaggtatttgattacctagtggctcatggcaggatgaaagaaaaagaggctcgagccaaattccgccagatagtgtctgctgtgcagtactgtcaccagaagtttattgtccatagagacttaaaggcagaaaacctgctcttggatgctgatatgaacatcaagattgcagactttggcttcagcaatgaattcacctttgggaacaagctggacaccttctgtggcagtcccccttatgctgccccagaactcttccagggcaaaaaatatgatggacccgaggtggatgtgtggagcctaggagttatcctctatacactggtcagcggatccctgccttttgatggacagaacctcaaggagctgcgggaacgggtactgaggggaaaataccgtattccattctacatgtccacggactgtgaaaacctgcttaagaaatttctcattcttaatcccagcaagagaggcactttagagcaaatcatgaaagatcgatggatgaatgtgggtcacgaagatgatgaactaaagccttacgtggagccactccctgactacaaggacccccggcggacagagctgatggtgtccatgggttatacacgggaagagatccaggactcgctggtgggccagagatacaacgaggtgatggccacctatctgctcctgggctacaagagctccgagctggaaggcgacaccatcaccctgaaaccccggccttcagctgatctgaccaatagcagcgccccatccccatcccacaaggtacagcgcagcgtgtcggccaatcccaagcagcggcgcttcagcgaccaggctggtcctgccattcccacctctaattcttactctaagaagactcagagtaacaacgcagaaaataagcggcctgaggaggaccgggagtcagggcggaaagccagcagcacagccaaggtgcctgccagccccctgcccggtctggagaggaagaagaccaccccaaccccctccacgaacagcgtcctctccaccagcacaaatcgaagcaggaattccccacttttggagcgggccagcctcggccaggcctccatccagaatggcaaagacagcacagccccccagcgtgtccctgttgcctccccatccgcccacaacatcagcagcagtggtggagccccagaccgaactaacttcccccggggtgtgtccagccgaagcaccttccatgctgggcagctccgacaggtgcgggaccagcagaatttgccctacggtgtgaccccagcctctccctctggccacagccagggccggcggggggcctctgggagcatcttcagcaagttcacctccaagtttgtacgcaggaacctgaatgaacctgaaagcaaagaccgagtggagacgctcagacctcacgtggtgggcagtggcggcaacgacaaagaaaaggaagaatttcgggaggccaagccccgctccctccgcttcacgtggagtatgaagaccacgagctccatggagcccaacgagatgatgcgggagatccgcaaggtgctggacgcgaacagctgccagagcgagctgcatgagaagtacatgctgctgtgcatgcacggcacgccgggccacgaggacttcgtgcagtgggagatggaggtgtgcaaactgccgcggctctctctcaacggggttcgatttaagcggatatcgggcacctccatggccttcaaaaacattgcctccaaaatagccaacgagctgaagctttaacaggctgccaggagcgggggcggcgggggcgggccagctggacgggctgccggccgctgcgccgccccacctgggcgagactgcagcgatggattggtgtgtctcccctgctggcacttctcccctccctggcccttctcagttttctcccacattcacccctgcccagagattcccccttctcctctcccctactggaggcaaaggaaggggagggtggatgggggggcagggctccccctcggtactgcggttgcacagagtatttcgcctaaaccaagaaattttttattaccaaaaagaaaaaaaaaaaaaaaaaa

SEQ ID NO: 178 - DNA, 4917 bp, Homo sapiens
agaagatgtcttcgcggacggtgctggccccgggcaacgatcggaactcggacacgcatggcaccttgggcagtggccgctcctcggacaaaggcccgtcctggtccagccgctcactgggtgcccgttgccggaactccatcgcctcctgtcccgaggagcagccccacgtgggcaactaccgcctgctgaggaccattgggaagggcaactttgccaaagtcaagctggctcggcacatcctcactggtcgggaggttgccatcaagattatcgacaaaacccagctgaatcccagcagcctgcagaagctgttccgagaagtccgcatcatgaagggcctaaaccaccccaacatcgtgaagctctttgaggtgattgagactgagaagacgctgtacctggtgatggagtacgcaagtgctggagaagtgtttgactacctcgtgtcgcatggccgcatgaaggagaaggaagctcgagccaagttccgacagattgtttcggctgtgcactattgtcaccagaaaaatattgtacacagggacctgaaggctgagaacctcttgctggatgccgaggccaacatcaagattgctgactttggcttcagcaacgagttcacgctgggatcgaagctggacacgttctgcgggagccccccatatgccgccccggagctgtttcagggcaagaagtacgacgggccggaggtggacatctggagcctgggagtcatcctgtacaccctcgtcagcggctccctgcccttcgacgggcacaacctcaaggagctgcgggagcgagtactcagagggaagtaccgggtccctttctacatgtcaacagactgtgagagcatcctgcggagatttttggtgctgaacccagctaaacgctgtactctcgagcaaatcatgaaagacaaatggatcaacatcggctatgagggtgaggagttgaagccatacacagagcccgaggaggacttcggggacaccaagagaattgaggtgatggtgggtatgggctacacacgggaagaaatcaaagagtccttgaccagccagaagtacaacgaagtgaccgccacctacctcctgctgggcaggaagactgaggagggtggggaccggggcgccccagggctggccctggcacgggtgcgggcgcccagcgacaccaccaacggaacaagttccagcaaaggcaccagccacagcaaagggcagcggagttcctcttccacctaccaccgccagcgcaggcatagcgatttctgtggcccatcccctgcacccctgcaccccaaacgcagcccgacgagcacgggggaggcggagctgaaggaggagcggctgccaggccggaaggcgagctgcagcaccgcggggagtgggagtcgagggctgcccccctccagccccatggtcagcagcgcccacaaccccaacaaggcagagatcccagagcggcggaaggacagcacgagcacccccaacaacctccctcctagcatgatgacccgcagaaacacctacgtttgcacagaacgcccgggggctgagcgcccgtcactgttgccaaatgggaaagaaaacagctcaggcaccccacgggtgccccctgcctccccctccagtcacagcctggcacccccatcaggggagcggagccgcctggcacgcggttccaccatccgcagcaccttccatggtggccaggtccgggaccggcgggcagggggtgggggtggtgggggtgtgcagaatgggccccctgcctctcccacactggcccatgaggctgcacccctgcccgccgggcggccccgccccaccaccaacctcttcaccaagctgacctccaaactgacccgaagggttaccctcgatccctctaaacggcagaactctaaccgctgtgtttcgggcgcctctctgccccagggatccaagatcaggtcgcagacgaacctgagagaatcgggggacctgaggtcacaagttgccatctaccttgggatcaaacggaaaccgccccccggctgctccgattcccctggagtgtgaagctgaccagctcgcgccctcctgaggccctgatggcagctctgcgccaggccacagcagccgcccgctgccgctgccgccagccacagccgttcctgctggcctgcctgcacgggggtgcgggcgggcccgagcccctgtcccacttcgaagtggaggtctgccagctgccccggccaggcttgcggggagttctcttccgccgtgtggcgggcaccgccctggccttccgcaccctcgtcacccgcatctccaacgacctcgagctctgagccaccacggtcccagggcccttactcttcctctcccttgtcgccttcacttctacaggaggggaaggggccagggaggggattctccctttatcatcacctcagtttccctgaattatatttgggggcaaagattgtcccctctgctgttctctggggccgctcagcacagaagaaggatgagggggctcagcggggggagctggcaccttcctggagcctccagccagtcctgtcctccctcgccctaccaagagggcacctgaggagactttggggacagggcaggggcagggagggaaactgaggaaatcttccattcctcccaacagctcaaaattaggccttgggcaggggcagggagagctgctgagcctaaagactggagaatctgggggactgggagtgggggtcagagaggcagattccttcccctcccgtcccctcacgctcaaacccccacttcctgccccaggctggcgcggggcactttgtacaaatccttgtaaataccccacaccctcccctctgcaaaggtctcttgaggagctgccgctgtcacctacggtttttaagttattacaccccgaccctcctcctgtcagccccctcacctgcagcctgttgcccaataaatttaagagagtccccccctccccaatgctgaccctaggattttccttccctgccctcacctgcaaatgagttaaagaagaggcgtgggaatccaggcagtggtttttcctttcggagcctcggttttctcatctgcagaatgggagcggtgggggtgggaaggtaaggatggtcgtggaagaaggcaggatggaactcggcctcatccccgaggccccagttcctatatcgggccccccattcatccactcacactcccagccaccatgttacactggactctaagccacttcttactccagtagtaaatttattcaataaacaatcattgacccatgcctactccatgccaggcccagtgctggacacagagacatgaagctctgtctgtgggagacagggattctgacacagacaccggacaaaccattgtcttggggagcccagaagagaaagtgggcagggtggggtcattggggaagatgctctagaggaattaatgctggaatggggtgttgaaggatgagtaggagttagttaggcattgagtttgccctgggcaaaagcccagaagtgggagtatgtggtatatcttcagagaactgggtaatttcagtgtggctgctgtgttgggcatggatggagaatcagcaagagaaatgctgtattaggactaataatccatctacgctgcttaagcaaaaaggtatttgttggtttatgttacttaatagtccaggggcacctggcttcaggtaggtttgatccaggcatcaggccattgcatctattttttcagtgtaagttgaattctagtaatttttatcaagtaagggctcctttcctggtggcacagatgacttcagcagttagaagtttctatccctccagctttctgcagcagaaagaccctcattgtcagtttcccagcaaaagtcccagggcagactctcattggcccaaatgggccatgtgattttctctaaaccaatcactgtgactctagagtggccagactcagagctgcacttagtaggggttcctcaaaggaaggtcaagtgtcatgagcaggagaaaaggcatgggagctggacagattatagtggttgaagtctgtgcagtacagaagggcggagcttattcacacagcacctttggggccaaaatgaataagctggactttctccccatggcactggggaaccatggaagttcagggaacttcagggaagaggcttggtcaattcctgagagcatcctctgtgctggggacacagtggtaatcaagacagccccaacactgccctcatagagctcacagtccaatggaggaggcagatgtgtcctcaggcagcgactgggcagggctggtataggggagtccagaggtgatgcctgcctcagccagggagggcttcctggaggagaaggagccagctagacatggataggagtgcgttttaggcacagcaaatggcacatacaagggccagggagcaagagagaggacaggtcctcaacaaatggcatgtgactttgtaagtgtagaattgctgtgaggtatggggctaggggcgtcagtagggccttgaaggttatggacaggggcctgggctttcttccaagggcactgggggagccatggcaaggttgtaggtagggtagagatgggcgggtttgtgctatgtgcagggtggaagggagggaagttgacaggtcagaagatcaggaaagaggtcggggctggacagatggggagagcgcagatagatttaagagagtcctgtgaggcaaagtgggcaggacctggtaacaggtgtctggactgtggctttggctggctcagaaggtccccactggcgtgtgtggtctatgtagcctctgggtgtggagctgggatcttcaactggggacagtacagtaaagaacatcacagc

SEQ ID NO: 179 - DNA, 2357 bp, Homo sapiens
cgagcttggctgcttctggggcctgtgtggccctgtgtgtcggaaagatggagcaagaagccgagcccgaggggcggccgcgacccctctgaccgagatcctgctgctttcgcagccaggagcaccgtccctccccggattagtgcgtacgagcgcccagtgccctggcccggagagtggaatgatccccgaggcccagggcgtcgtgcttccgcgcgccccgtgaaggaaactggggagtcttgagggacccccgactccaagcgcgaaaaccccggatggtgaggagcaggcaaatgtgcaataccaacatgtctgtacctactgatggtgctgtaaccacctcacagattccagcttcggaacaagagaccctggttagaccaaagccattgcttttgaagttattaaagtctgttggtgcacaaaaagacacttatactatgaaagaggttcttttttatcttggccagtatattatgactaaacgattatatgatgagaagcaacaacatattgtatattgttcaaatgatcttctaggagatttgtttggcgtgccaagcttctctgtgaaagagcacaggaaaatatataccatgatctacaggaacttggtagtagtcaatcagcaggaatcatcggactcaggtacatctgtgagtgagaacaggtgtcaccttgaaggtgggagtgatcaaaaggaccttgtacaagagcttcaggaagagaaaccttcatcttcacatttggtttctagaccatctacctcatctagaaggagagcaattagtgagacagaagaaaattcagatgaattatctggtgaacgacaaagaaaacgccacaaatctgatagtatttccctttcctttgatgaaagcctggctctgtgtgtaataagggagatatgttgtgaaagaagcagtagcagtgaatctacagggacgccatcgaatccggatcttgatgctggtgtaagtgaacattcaggtgattggttggatcaggattcagtttcagatcagtttagtgtagaatttgaagttgaatctctcgactcagaagattatagccttagtgaagaaggacaagaactctcagatgaagatgatgaggtatatcaagttactgtgtatcaggcaggggagagtgatacagattcatttgaagaagatcctgaaatttccttagctgactattggaaatgcacttcatgcaatgaaatgaatcccccccttccatcacattgcaacagatgttgggcccttcgtgagaattggcttcctgaagataaagggaaagataaaggggaaatctctgagaaagccaaactggaaaactcaacacaagctgaagagggctttgatgttcctgattgtaaaaaaactatagtgaatgattccagagagtcatgtgttgaggaaaatgatgataaaattacacaagcttcacaatcacaagaaagtgaagactattctcagccatcaacttctagtagcattatttatagcagccaagaagatgtgaaagagtttgaaagggaagaaacccaagacaaagaagagagtgtggaatctagtttgccccttaatgccattgaaccttgtgtgatttgtcaaggtcgacctaaaaatggttgcattgtccatggcaaaacaggacatcttatggcctgctttacatgtgcaaagaagctaaagaaaaggaataagccctgcccagtatgtagacaaccaattcaaatgattgtgctaacttatttcccctagttgacctgtctataagagaattatatatttctaactatataaccctaggaatttagacaacctgaaatttattcacatatatcaaagtgagaaaatgcctcaattcacatagatttcttctctttagtataattgacctactttggtagtggaatagtgaatacttactataatttgacttgaatatgtagctcatcctttacaccaactcctaattttaaataatttctactctgtcttaaatgagaagtacttggtttttttttttcttaaatatgtatatgacatttaaatgtaacttattattttttttgagaccgagtcttgctctgttacccaggctggagtgcagtggcgtgatcttggctcactgcaagctctgcctcccgggttcgcaccattctcctgcctcagcctcccaattagcttggcctacagtcatctgccaccacacctggctaattttttgtacttttagtagagacagggtttcaccgtgttagccaggatggtctcgatctcctgacctcgtgatccgcccacctcggcctcccaaagtgctgggattacaggcatgagccaccg

SEQ ID NO: 180 - DNA, 4243 bp, Homo sapiens
ggcgtgtgcaaggcggggtccggcccgcgcaggtcgggtaagcgcgtctagggcgctgcgcggcgcagcgaaaatggcggcttccaggtgggcgcgcaaggccgtggtcctgctttgtgcctctgacctgctgctgctgctgctactgctaccaccgcctgggtcctgcgcggccgaaggctcgcccgggacgcccgacgagtctaccccacctccccggaagaagaagaaggatattcgcgattacaatgatgcagacatggcgcgtcttctggagcaatgggagaaagatgatgacattgaagaaggagatcttccagagcacaagagaccttcagcacctgtcgacttctcaaagatagacccaagcaagcctgaaagcatattgaaaatgacgaaaaaagggaagactctcatgatgtttgtcactgtatcaggaagccctactgagaaggagacagaggaaattacgagcctctggcagggcagccttttcaatgccaactatgacgtccagaggttcattgtgggatcagaccgtgctatcttcatgcttcgcgatgggagctacgcctgggagatcaaggactttttggtcggtcaagacaggtgtgctgatgtaactctggagggccaggtgtaccccggcaaaggaggaggaagcaaagagaaaaataaaacaaagcaagacaagggcaaaaaaaagaaggaaggagatctgaaatctcggtcttccaaggaagaaaatcgagctgggaataaaagagaagacctgtgatggggcagcagtgacgcgctgtggggggacaggtggacgtggagagctctttgcccagctcctggggtgggagtggtctcaggcaactgcacaccggatgacattctagtgtcttctagaaagggtctgccacatgaccagtttgtggtcaaagaattactgcttaataggcttcaagtaagaagacagatgttttctaattaatactggacactgacaaattcatgtttactataaaatctccttacatggaaatgtgactgtgttgctttttcccatttacacttggtgagtcatcaactctactgagattccactcccctccaagcacctgctgtgattgggtggcctgctctgatcagatagcaaattctgatcagagaagactttaaaactcttgacttaattgagtaaactcttcatgccatatacatcattttcattatgttaaaggtaaaatatgctttgtgaactcagatgtctgtagccaggaagccagggtgtgtaaatccaaaatctatgcaggaaatgcggagaatagaaaatatgtcacttgaaatcctaagtagttttgaatttctttgacttgaatcttactcatcagtaagagaactcttggtgtctgtcaggttttatgtggtctgtaaagttaggggttctgttttgtttccttatttaggaaagagtactgctggtgtcgaggggttatatgttccatttaatgtgacagttttaaaggatttaagtagggaatcagagtcctttgcagagtgtgacagacgactcaataacctcatttgtttctaaacatttttctttgataaagtgcctaaatctgtgctttcgtatagagtaacatgatgtgctactgttgatgtctgattttgccgttcatgttagagcctactgtgaataagagttagaacatttatatacagatgtcatttctaagaactaaaattctttgggaaaaaccctcaattgtgattttaataaattaaaagtagcacattacatggttagaaaatgtcagtgttaaagaatggtacaaagtgaaaagtgtatccctctcttgccgccggtggtagcttgtcccagtggaagctgctgttaacaatttgtgcccccacatccccctccctgcccatccaccaaaaaaaagtacatttacttatgtaaatgtacttatggtgatgtatgtttgttttggcctcacagcatctgtttccccttaatttggtagctgctcacatttccctcgaaagaaccacaccctctgcattctcagttctctgctttggatgggacatttgccctgcagtccccccaccctccaggccatgccctctccagggtgaggcctgtgtgatctaccgtactagggtactaggccctgaaagaggcttttcttgttcctcctgcatcttgaacctggagcgggagctgttgtaggccccgcccttggagaagagaactgtctgacagtggggagagagcgccacaccctggtggcataaacgagtccctgaatcatgccgtggctgaaccaagccctgtctgtgggctttttctgttgtactcagggcagtttgatggggttactgtcctgcatagccataatggcccagtataaagcagctgttttgatgagataattgctttaattaagcaaaaggtagcaaagctttcactccgccctgtaccttctgtttccacttaggagccttcccatgtcagaatgtgcagatctgtctcattgtttcctgtgcagtgtgcccccacttcacccagtagtttctgtgtgtctgttatgtactaggtactacaaggtgccaggacggtgtagatacagcctctgctatcgtaaaactcaatgattcggtgggggaagacaaatgtcagtaatgtacaaagtaaaatggcagctgttagaagtatgaaaggggcagggtagggggaggtagaatcttccctgaccaggttaagaaaaccagaggccttctctgagggcaagaggaggagaggagaaatagagtaaggcaggcagaggaaacagtctgagctaagaccctgtggctagaagtggcagagggagaggcagcaggaaggccagcggggaggctggggcccagtgcaggcccaggttggaggagcgtagcacatggagtttggtaggagtttgggacgccctggtggatcttaattgtgatggggtgggtgtgaaaggcagtccaggttgcactggttgcacaggagaagtgatcagaagaggaccccagcaggtgtgagccgtgagctgggaggtgcttcagtagtgcaggccatagctgaaggtgtcctacatcagcagggtgatggtgaggtttgaaccactgtttcactgcatagtccctgctgatggacacttgagtgttcagattttttgctggtatattcagtgctgcagtggacattttcatacaaaatatttcggtacacttttgtttatatctgaaaggtaaattcctagcagtagaattattagagcaaacggaatttaacattttggtgtgtattgccaaattgccctcccaagtggtttagtcagcttacccttgccaacaatagatctatccttgccagccttgggcatcacatttaccagtttaatagattgtaaaaccatatcttaattggctaccctgaagccaccatactggagaggctgcgtacagtgtttcacgtagagagagggatacccaggaggcccacctgctccaaccccagctgcatgagtcttcccagcccaggcacagacatgtggataagatttaaacatttccagccccagccttcaagcaatcctagttgacactgaggggagccaacataagctgagctgagaaacagtctgcccagtctgcagattcatgagcaaaagaaatgttgggctgggtacagtggctcacgcctgtaatcccagtactttgggaggccgaggtgggtggatcagttgaggtcaggagtttgagaccagcctggccaacatggtgaagccctgtctctactaaaaattagccgagtgtggtggtgcgggcctgtaatcccagctactcaggtggctgaggcaggagaatggcttgaacccgggaggcggaggttgcagtgagccaagatcaggccactgcactccagcctggatgacgggatgagactctgtctcaaaaaaacgaaacaaaaattttttaagagaaatgtcatttgtttttgtttttgagacagggtctcactctgttgccctcactagagtgcagtaggatcacggctcactgaagtctctacctaccggctcaattgatcttcccaccacagcctcccaaatagctgggagaaatgtcctgtttttaatgaatttgtcttcctttttgtcttgtttgttttaatatctagtgatctaataaatttggatgatatcttttgactatc

SEQ ID NO: 181 - DNA, 2736 bp, Homo sapiens
gcgaccgctccccggcgggagccagcgaaggtttccatgtcagaggccgatggagaactgaagattgccacctacgcacaaaggccattgagacacttcgtgtagctggaagacaccaacttcctgacaggagctttatttcatttgggatttcaagtttacagatggtatcttctcaaaagttggaaaaacctatagagatgggcagtagcgaaccccttcccatcgcagatggtgacaggaggaggaagaagaagcggaggggccgggccactgactccttgccaggaaagtttgaagatatgtacaagctgacctctgaattgcttggagagggagcctatgccaaagttcaaggtgccgtgagcctacagaatggcaaagagtatgccgtcaaaatcatcgagaaacaagcagggcacagtcggagtagggtgtttcgagaggtggagacgctgtatcagtgtcagggaaacaagaacattttggagctgattgagttctttgaagatgacacaaggttttacttggtctttgagaaattgcaaggaggttccatcttagcccacatccagaagcaaaagcacttcaatgagcgagaagccagccgagtggtgcgggacgttgctgctgcccttgacttcctgcataccaaagacaaagtctctctctgtcacctaggctggagtgctatggcgccatcagggctcactgcagccccaacctccctgggctccagtgatcctcccacctcagcctcccaagtagctgggactacaggcattgctcatcgtgatctgaaaccagaaaatatattgtgtgaatctccagaaaaggtgtctccagtgaaaatctgtgactttgacttgggcagtgggatgaaactgaacaactcctgtacccccataaccacaccagagctgaccaccccatgtggctctgcagaatacatggcccctgaggtagtggaggtcttcacggaccaggccacattctacgacaagcgctgtgacctgtggagcctgggcgtggtcctctacatcatgctgagtggctacccacccttcgtgggtcactgcggggccgactgtggctgggaccggggcgaggtctgcagggtgtgccagaacaagctgtttgaaagcatccaggaaggcaagtatgagtttcctgacaaggactgggcacacatctccagtgaagccaaagacctcatctccaagctcctggtgcgagatgcaaagcagagacttagcgccgcccaagttctgcagcacccatgggtgcaggggcaagctccagaaaagggactccccacgccgcaagtcctccagaggaacagcagcacaatggacctgacgctcttcgcagctgaggccatcgcccttaaccgccagctatctcagcacgaagagaacgaactagcagaggagccagaggcactagctgatggcctctgctccatgaagctttcccctccctgcaagtcacgcctggcccggagacgggccctggcccaggcaggccgtggtgaagacaggagcccgcccacagcactctgaaatgctccagtcacaccttataggccctaggcctggccaggcattgtcccctggaaacctgtgtggctaaagtctgctgagcaggcagcagcctctgctctgtggctccattcaggctttttcatctacgaaggccctgaggttcccatcaacccccatttccctagggtcctggaggaaaaagctttttccaaaggggttgtctttgaaaaggaaagcaatcacttctcactttgcataattgcctgcagcaggaacatctcttcactgggctccacctgctcacccgcctgcagatctgggatccagcctgctctcaccgctgtagctgtggcggctggggctgcagcctgcagggagaagcaagaagcatcagttgacagaggctgccgacacgtgcctcttccctctcttctctgtcaccctcctctggcggtccttccaccttcctctgtcctccggatgtcctctttgcccgtcttctcccttggctgagcaaagccatcccctcaattcagggaagggcaaggagccttcctcattcaggaaatcaaatcagtcttccggtctgcagcacggaaaagcacataatctttctttgctgtgactgaaatgtatccctcgtttatcatcccctttgtttgtgattgctgctaaagtcagtagtatcgtttttttaaaaaaaaagtttggtgtttttaaccatgctgttccagcaaagatgataccttaaactcccactgcaagcccatgaacttcccagagagtggaacggcttgctcttctttctagaatgtccatgcacttgggttttaatcagcagttccctattattctgattttaagctgttcctgtgatgaacttagagacagcatcggtgtctgctgctgtgtccccaggtcttgtgtgggtggcacagatctgggcagttagatagtgctctgtgcctaaggtgaagccacactagggtgaagcctcacttccctgtttgagcaatgcagtgcctgctgcccgtgtgcatgaaggtacagccattcagataagtggaactattgagttacataaagaaaatagatttgcatttgtcaggcagacgtttatacaacaccacggtgcttttatacattgtgcttattttaataaaactgaaattctaaaaaaaaaaaaaaaaaa

SEQ ID NO: 182 - DNA, 2722 bp, Homo sapiens
caacagtccccaggcatcaccattcaagatgcatccaggggtcctggctgccttcctcttcttgagctggactcattgtcgggccctgccccttcccagtggtggtgatgaagatgatttgtctgaggaagacctccagtttgcagagcgctacctgagatcatactaccatcctacaaatctcgcgggaatcctgaaggagaatgcagcaagctccatgactgagaggctccgagaaatgcagtctttcttcggcttagaggtgactggcaaacttgacgataacaccttagatgtcatgaaaaagccaagatgcggggttcctgatgtgggtgaatacaatgttttccctcgaactcttaaatggtccaaaatgaatttaacctacagaattgtgaattacacccctgatatgactcattctgaagtcgaaaaggcattcaaaaaagccttcaaagtttggtccgatgtaactcctctgaattttaccagacttcacgatggcattgctgacatcatgatctcttttggaattaaggagcatggcgacttctacccatttgatgggccctctggcctgctggctcatgcttttcctcctgggccaaattatggaggagatgcccattttgatgatgatgaaacctggacaagtagttccaaaggctacaacttgtttcttgttgctgcgcatgagttcggccactccttaggtcttgaccactccaaggaccctggagcactcatgtttcctatctacacctacaccggcaaaagccactttatgcttcctgatgacgatgtacaagggatccagtctctctatggtccaggagatgaagaccccaaccctaaacatccaaaaacgccagacaaatgtgacccttccttatcccttgatgccattaccagtctccgaggagaaacaatgatctttaaagacagattcttctggcgcctgcatcctcagcaggttgatgcggagctgtttttaacgaaatcattttggccagaacttcccaaccgtattgatgctgcatatgagcacccttctcatgacctcatcttcatcttcagaggtagaaaattttgggctcttaatggttatgacattctggaaggttatcccaaaaaaatatctgaactgggtcttccaaaagaagttaagaagataagtgcagctgttcactttgaggatacaggcaagactctcctgttctcaggaaaccaggtctggagatatgatgatactaaccatattatggataaagactatccgagactaatagaagaagacttcccaggaattggtgataaagtagatgctgtctatgagaaaaatggttatatctattttttcaacggacccatacagtttgaatacagcatctggagtaaccgtattgttcgcgtcatgccagcaaattccattttgtggtgttaagtgtctttttaaaaattgttatttaaatcctgaagagcatttggggtaatacttccagaagtgcggggtaggggaagaagagctatcaggagaaagcttggttctgtgaacaagcttcagtaagttatctttgaatatgtagtatctatatgactatgcgtggctggaaccacattgaagaatgttagagtaatgaaatggaggatctctaaagagcatctgattcttgttgctgtacaaaagcaatggttgatgatacttcccacaccacaaatgggacacatggtctgtcaatgagagcataatttaaaaatatatttataaggaaattttacaagggcataaagtaaatacatgcatataatgaataaatcattcttactaaaaagtataaaatagtatgaaaatggaaatttgggagagccatacataaaagaaataaaccaaaggaaaatgtctgtaataatagactgtaacttccaaataaataattttcattttgcactgaggatattcagatgtatgtgcccttcttcacacagacactaacgaaatatcaaagtcattaaagacaggagacaaaagagcagtggtaagaatagtagatgtggcctttgaattctgtttaattttcacttttggcaatgactcaaagtctgctctcatataagacaaatattcctttgcatattataaaggataaagaaggatgatgtctttttattaaaatatttcaggttcttcagaagtcacacattacaaagttaaaattgttatcaaaatagtctaaggccatggcatccctttttcataaattatttgattatttaagactaaaagttgcattttaaccctattttacctagctaattatttaattgtccggtttgtcttggatatataggctattttctaaagacttgtatagcatgaaataaaatatatcttataaagtggaagtatgtatattaaaaaagagacatccaaatttttttttaaagcagtctactagattgtgatcccttgagatatggaaggatgcctttttttctctgcatttaaaaaaatcccccagcacttcccacagtgcctattgatacttggggagggtgcttggcacttattgaatatatgatcggccatcaagggaagaactattgtgctcagagacactgttgataaaaactcaggcaaagaaaatgaaatgcatatttgcaaagtgtattaggaagtgtttatgttgtttataataaaaatatattttcaacagaaaaaaaa

SEQ ID NO: 183 - DNA, 998 bp, Homo sapiens
gacaaatgagggtttggcatgcagctcgtcatcttaagagttactatcttcttgccctggtgtttcgccgttccagtgccccctgctgcagaccataaaggatgggactttgttgagggctatttccatcaatttttcctgaccaagaaggagtcgccactccttacccaggagacacaaacacagctcctgcaacaattccatcggaatgggacagacctacttgacatgcagatgcatgctctgctacaccagccccactgtggggtgcctgatgggtccgacacctccatctcgccaggaagatgcaagtggaataagcacactctaacttacaggattatcaattacccacatgatatgaagccatccgcagtgaaagacagtatatataatgcagtttccatctggagcaatgtgacccctttgatattccagcaagtgcagaatggagatgcagacatcaaggtttctttctggcagtgggcccatgaagatggttggccctttgatgggccaggtggtatcttaggccatgcctttttaccaaattctggaaatcctggagttgtccattttgacaagaatgaacactggtcagcttcagacactggatataatctgttcctggttgcaactcatgagattgggcattctttgggcctgcagcactctgggaatcagagctccataatgtaccccacttactggtatcacgaccctagaaccttccagctcagtgccgatgatatccaaaggatccagcatttgtatggagaaaaatgttcatctgacataccttaatgttagcacagaggacttattcaacctgtcctttcagggagtttattggaggatcaaagaactgaaagcactagagcagccttggggactgctaggatgaagccctaaagaatgcaacctagtcaggttagctgaaccgacactcaaaacgctactgagtcacaataaagattgttttaaagagtaaaaaaaaa

SEQ ID NO: 184 - DNA, 1147 bp, Homo sapiens
accaaatcaaccataggtccaagaacaattgtctctggacggcagctatgcgactcaccgtgctgtgtgctgtgtgcctgctgcctggcagcctggccctgccgctgcctcaggaggcgggaggcatgagtgagctacagtgggaacaggctcaggactatctcaagagattttatctctatgactcagaaacaaaaaatgccaacagtttagaagccaaactcaaggagatgcaaaaattctttggcctacctataactggaatgttaaactcccgcgtcatagaaataatgcagaagcccagatgtggagtgccagatgttgcagaatactcactatttccaaatagcccaaaatggacttccaaagtggtcacctacaggatcgtatcatatactcgagacttaccgcatattacagtggatcgattagtgtcaaaggctttaaacatgtggggcaaagagatccccctgcatttcaggaaagttgtatggggaactgctgacatcatgattggctttgcgcgaggagctcatggggactcctacccatttgatgggccaggaaacacgctggctcatgcctttgcgcctgggacaggtctcggaggagatgctcacttcgatgaggatgaacgctggacggatggtagcagtctagggattaacttcctgtatgctgcaactcatgaacttggccattctttgggtatgggacattcctctgatcctaatgcagtgatgtatccaacctatggaaatggagatccccaaaattttaaactttcccaggatgatattaaaggcattcagaaactatatggaaagagaagtaattcaagaaagaaatagaaacttcaggcagaacatccattcattcattcattggattgtatatcattgttgcacaatcagaattgataagcactgttcctccactccatttagcaattatgtcacccttttttattgcagttggtttttgaatgtctttcactccttttaaggataaactcctttatggtgtgactgtgtcttattcatctatacttgcagtgggtagatgtcaataaatgttacatacacaaataaataaaatgtttattccatggtaaatttaaaaaaaaaaaaaaaaaaaaaaaaaaaaa

SEQ ID NO: 185 - DNA, 1243 bp, Homo sapiens
ggacgcaaccatctgcggaaaggataggggggaggaagacttaacactgcaacaacaggtacaaaaaagaaggaaactcagtaacaggacccagaggaccattatatattgctctatattctaggtcgcccactttacacttccttctcatgcacttggtcaataccacgcccgctgaccacactggcgacttccctctctgtcgcccctccgtgaagtcagacccactctgcgggccaagaaaggtgaccgggcttccttccggcttgctaagcagaggccggaagcggtggtttttagcggctctctgggtagcagggtggtgtgatagcggcagcgaggggctcggagaggtgctcggattctcgtagctgtgccgggacttaaccaccaccatgtcgagcaaaagaacaaagaccaagaccaagaagcgccctcagcgtgcaacatccaatgtgtttgctatgtttgaccagtcgcagattcaggagttcaaagaggccttcaacatgattgatcagaacagagatggtttcatcgacaaggaagatttgcatgatatgcttgcttcattggggaagaatccaactgatgagtatctagatgccatgatgaatgaggctccaggccccatcaatttcaccatgttcctcaccatgtttggtgagaagttaaatggcacagatcctgaagatgtcatcagaaatgcctttgcttgctttgatgaagaagcaactggcaccatacaggaagattacttgagagagctgctgacaaccatgggggatcggtttacagatgaggaagtggatgagctgtacagagaagcacctattgataaaaaggggaatttcaattacatcgagttcacacgcatcctgaaacatggagccaaagacaaagatgactgaaataacttcaaattccagccaaacgttccttgttgccactttgggtattctgagattttctcttgcatgcccttagctttacagcttttgcatttcctgttgtatttattctcagccattttgggcatatgtatctttataatcagactggaaacgggactttctattaatatcattttcagaataaaaaataggataatttaacctaccagcccttctcccccaataactgtggtctatacagagtcaatatattttttcggagaaagttattcgctcgattttttctgaatcataattaaactttatgataaaataaaaaaaaaaaaaaa

SEQ ID NO: 186 - DNA, 2377 bp, Homo sapiens
acccccgagctgtgctgctcgcggccgccaccgccgggccccggccgtccctggctcccctcctgcctcgagaagggcagggcttctcagaggcttggcgggaaaaagaacggagggagggatcgcgctgagtataaaagccggttttcggggctttatctaactcgctgtagtaattccagcgagaggcagagggagcgagcgggcggccggctagggtggaagagccgggcgagcagagctgcgctgcgggcgtcctgggaagggagatccggagcgaatagggggcttcgcctctggcccagccctcccgctgatcccccagccagcggtccgcaacccttgccgcatccacgaaactttgcccatagcagcgggcgggcactttgcactggaacttacaacacccgagcaaggacgcgactctcccgacgcggggaggctattctgcccatttggggacacttccccgccgctgccaggacccgcttctctgaaaggctctccttgcagctgcttagacgctggatttttttcgggtagtggaaaaccagcagcctcccgcgacgatgcccctcaacgttagcttcaccaacaggaactatgacctcgactacgactcggtgcagccgtatttctactgcgacgaggaggagaacttctaccagcagcagcagcagagcgagctgcagcccccggcgcccagcgaggatatctggaagaaattcgagctgctgcccaccccgcccctgtcccctagccgccgctccgggctctgctcgccctcctacgttgcggtcacacccttctcccttcggggagacaacgacggcggtggcgggagcttctccacggccgaccagctggagatggtgaccgagctgctgggaggagacatggtgaaccagagtttcatctgcgacccggacgacgagaccttcatcaaaaacatcatcatccaggactgtatgtggagcggcttctcggccgccgccaagctcgtctcagagaagctggcctcctaccaggctgcgcgcaaagacagcggcagcccgaaccccgcccgcggccacagcgtctgctccacctccagcttgtacctgcaggatctgagcgccgccgcctcagagtgcatcgacccctcggtggtcttcccctaccctctcaacgacagcagctcgcccaagtcctgcgcctcgcaagactccagcgccttctctccgtcctcggattctctgctctcctcgacggagtcctccccgcagggcagccccgagcccctggtgctccatgaggagacaccgcccaccaccagcagcgactctgaggaggaacaagaagatgaggaagaaatcgatgttgtttctgtggaaaagaggcaggctcctggcaaaaggtcagagtctggatcaccttctgctggaggccacagcaaacctcctcacagcccactggtcctcaagaggtgccacgtctccacacatcagcacaactacgcagcgcctccctccactcggaaggactatcctgctgccaagagggtcaagttggacagtgtcagagtcctgagacagatcagcaacaaccgaaaatgcaccagccccaggtcctcggacaccgaggagaatgtcaagaggcgaacacacaacgtcttggagcgccagaggaggaacgagctaaaacggagcttttttgccctgcgtgaccagatcccggagttggaaaacaatgaaaaggcccccaaggtagttatccttaaaaaagccacagcatacatcctgtccgtccaagcagaggagcaaaagctcatttctgaagaggacttgttgcggaaacgacgagaacagttgaaacacaaacttgaacagctacggaactcttgtgcgtaaggaaaagtaaggaaaacgattccttctaacagaaatgtcctgagcaatcacctatgaacttgtttcaaatgcatgatcaaatgcaacctcacaaccttggctgagtcttgagactgaaagatttagccataatgtaaactgcctcaaattggactttgggcataaaagaacttttttatgcttaccatcttttttttttctttaacagatttgtatttaagaattgtttttaaaaaattttaagatttacacaatgtttctctgtaaatattgccattaaatgtaaataactttaataaaacgtttatagcagttacacagaatttcaatcctagtatatagtacctagtattataggtactataaaccctaattttttttatttaagtacattttgctttttaaagttgatttttttctattgtttttagaaaaaataaaataactggcaaatatatcattgagccaaaaaaaaaaaaaaaaaaaaa

SEQ ID NO: 187 - DNA, 1052 bp, Homo sapiens
actctgggtccatcttcaagacactgggctgtggatcaacccaaccaccactcctcttccaagaatcattttgacaggttcttttggaggaactccttctctttttaacccacccttttaaaaaaaaaaatggcaccaaagaaagacgtgaagaaacctgtggctgcggctgcggctgccccagccccggcaccggcacctgcacctgcccctgccccagccaaacccaaagaagaaaaaattgacctctctgccattaagatcgagttctctaaggaacagcaggatgaattcaaggaggcatttctcctgtttgacagaacaggtgattccaagatcaccttaagccaggtcggtgatgtccttcgagctctgggcacaaatcccaccaatgcagaggtcaggaaagttctgggaaaccccagcaatgaagagctgaatgccaagaaaattgagtttgaacaatttctgcctatgatgcaagccatttccaacaacaaggaccaggccacctatgaagactttgttgagggtctgcgtgtctttgacaaggaaggcaatggcacagtcatgggtgctgaactccgccatgttctagccaccctgggtgaaaagatgaaagaggaagaagtggaagccctgatggcaggtcaagaagactccaatggctgcatcaactacgaagcttttgtcaagcacatcatgtctatctgaatggagctctcaagaacaagcattgtttaggaagactggctggaaacttattttaatcacacccatgacaaactctccagatctgtttaccatcattcaggaaaacaaagcaatctggacggttcaagactgagcaactccctgaatttttatacatcttcagtttttctctgaattgaattcataccacacaaacaaagtgtctgctgctctagatgagaagaataaaatattgacaatctcaaatccaagcaccattctttattatctaccatgaatcaacaaacattcttaaaacaataaatcaataaacaattttggtcagtctggaatgttca

SEQ ID NO: 188 - DNA, 809 bp, Homo sapiens
gcggagtgtggaattcttctcgggaggcagtgctgggtcctttccaccatggcacctaagaaagcaaagaagagagccgggggcgccaactccaacgtgttctccatgttcgaacagacccaaatccaggaatttaaggaggccttcactatcatggaccagaacagggatggcttcattgacaagaacgatctgagagacacctttgctgcccttgggcgagtgaacgtgaaaaatgaagaaattgatgaaatgatcaaggaggctccgggtccaattaactttactgtgttcctcacaatgtttggggagaaacttaagggagcggaccctgaggaaaccattctcaacgcattcaaagtgtttgaccctgaaggcaaaggggtgctgaaggctgattacgttcgggaaatgctgaccacgcaggcggagaggttttccaaggaggaggttgaccagatgttcgccgccttcccccctgacgtgactggcaacttggactacaagaacctggtgcacatcatcacccacggagaagagaaggactaggagggggctcgctgctgcgccctgggctcgtctttgcagagtggtccctgccctcatctctctcccccgagtaccgcctctgtccctaccttgtctgttagccatgtggctgccccatttatccacctccatcttctttgcagcctgggtggctatgggtacttcgtggccgcacatcctacagttggaaatccatccagaggccatgttccaataaacaggaggtcgtgtaaaaaaaaaaaaaaaaaaaaaaaaaaaaa

SEQ ID NO: 189 - DNA, 942 bp, Homo sapiens
atccgggcaggataaaggcctgggtgaggcggctcacctaccctgctttctgcattcttctctccacatccctctctgtacttacagcccccaatggcccccaaaaagccagagcccaagaaggatgatgccaaggcagcccccaaggcagctccagctcccgcacctccccctgagcctgagcgccctaaggaggtcgagtttgatgcttccaagatcaagattgagttcacacctgagcagattgaagagttcaaggaagccttcatgctgttcgaccgcacacccaagtgtgagatgaagatcacctacgggcagtgtggggatgtcctgcgggcgctgggccagaaccccacacaggcagaagtgctccgtgtcctggggaagccaagacaggaagagctcaataccaagatgatggactttgaaactttcctgcctatgctccagcacatttccaagaacaaggacacaggcacctatgaggacttcgtggaggggctgcgggtcttcgacaaggagggcaatggcactgtcatgggtgctgagcttcgccacgtgctggccacgctgggtgagaggctgacagaagacgaagtggagaagttgatggctgggcaagaggactccaatggctgcatcaactatgaagcatttgtgaagcacatcatgtccagctaaacctcgtgcccaggaagcccagggaaggctgtgcagggacgtctcatctcccatgtgtgatgctgacaccagcggcctggagtcgtgggaaggaggggagccttaccaagactcctgcaaaaacccttggacctctccacgtggttgccgtctctggcccctctcaggctgtgcttacctgtgacagcagctctgtccccaccccatgggcctcatgaataaatggcttcttgccggccttcctttctaaaaaaaaaaaaa

SEQ ID NO: 190 - DNA, 934 bp, Homo sapiens
ctctctggctgctccggcatatttgagaaggtctgtttccctggtccttctgggtttccaccaattggcaagaagggatcagcctgtcctagagatcactcctctgccaaagatcccaacaagacaacatggctcccaagaagcctgagcctaagaaggaggcagccaagccagctccagctccagctccagcccctgcaccagcccctgccccagctcctgaggctcccaaggaacctgcctttgaccccaagagtgtaaagatagacttcactgccgaccagattgaagagttcaaagaggccttttcattgtttgaccggaccccgactggagagatgaagatcacctacggccagtgcggggatgtactgcgggccctgggccagaaccctaccaatgccgaggtgctgcgtgtgctgggcaagcccaagcctgaagagatgaatgtcaagatgctggactttgagacgttcttgcccatcctgcagcacatttcccgcaacaaggagcagggcacctatgaggacttcgtggagggcctgcgtgtctttgacaaggagagcaatggcacggtcatgggtgctgagcttcggcacgtccttgccaccctgggagagaagatgactgaggctgaagtggagcagctgttagctgggcaagaggatgccaatggctgcatcaattatgaagcctttgtcaagcacatcatgtcagggtgaagcagagtcttccaggtgcctggcccttggctttagccataccagggtgagttaaagagaggccccggctgggtgagctgagatggagtcctcgacttatcaccacaccactgccccaaggaccttacaggccctccctgttaataaacagctctaacacggccaggctgggctctgggattctgaaaaaaaaaaaaaaaaaaaaaaaaaaa

SEQ ID NO: 191 - DNA, 661 bp, Homo sapiens
ggagtggcagccggagtctgaactgtcctgggggaccaagcaggagcttaagatgggcaagacctggggccctgggcagacgcatcaaagcaggcagaagcaggcatggccagcaggaagaccaagaagaaggaagggggtgccctccgggcccagagagcctcatccaatgtcttctccaactttgagcagactcagatccaggagttcaaggaggcattcacactcatggatcagaaccgagatggcttcattgacaaggaggacctgaaggacacctatgcctccctgggcaagaccaacgtcaaggacgacgagctggacgccatgctcaaagaggcctcggggcccatcaacttcaccatgtttctgaacctgtttggggagaagctgagcggtaccgacgccgaggagaccattcttaacgccttcaagatgctggacccggacgggaaagggaaaatcaacaaggagtacatcaagcgtctgctgatgtcccaggctgacaagatgacggcggaagaggtggaccagatgttccagttcgcctccatcgatgtggcgggcaacctggactacaaggcgctcagctacgtgatcacccacggggaggagaaggaggagtgagacccagccgggtcaataaacctggacgcttgga

SEQ ID NO: 192 - DNA, 758 bp, Homo sapiens
gtcatcgggacgtactaagactagggttgggccgagagtcggagccattactgcaggaaaaggtcccggagagctgagcagtcaagatgtgtgacttcaccgaagaccagaccgcagagttcaaggaggccttccagctgtttgaccgaacaggtgatggcaagatcctgtacagccagtgtggggatgtgatgagggccctgggccagaaccctaccaacgccgaggtgctcaaggtcctggggaaccccaagagtgatgagatgaatgtgaaggtgctggactttgagcactttctgcccatgctgcagacagtggccaagaacaaggaccagggcacctatgaggattatgtcgaaggacttcgggtgtttgacaaggaaggaaatggcaccgtcatgggtgctgaaatccggcatgttcttgtcacactgggtgagaagatgacagaggaagaagtagagatgctggtggcagggcatgaggacagcaatggttgtatcaactatgaagcgtttgtgaggcatatcctgtcggggtgacgggcccatggggcggagctcgtccgcatggtgctgaatggctgaggaccttcccagtctccccagagtccgtgcctttccctgtgtgaattttgtatctagcctaaagtttccctaggctttcttgtctcagcaactttcccatcttgtctctcttggatgatgtttgccgtcagcattcaccaaataaacttgctctctgggccctcggtaaaa

SEQ ID NO: 193 - DNA, 869 bp, Homo sapiens
ggccaccggaattaacccttcagggctgggggccgcgctatgccccgccccctccccagccccagacacggaccccgcaggagatgggtgcccccatccgcacactgtcctttggccaccggacatcatgcctcccaagaaggatgttcccgtgaagaaaccagcagggccctccatctccaaacctgctgctaagccagcagcagcaggggctcctccagccaagaccaaagctgagccagctgtcccccaggcccctcagaaaacccaggagcctccagtcgatctctccaaagtggtgatcgagtttaacaaggaccagctggaggagttcaaggaggccttcgagctgtttgaccgagtgggggatggcaagatcctgtacagccagtgtggggacgtgatgagggccctgggccagaaccccaccaacgccgaggtgctcaaggtcctggggaaccccaagagtgatgagctgaagtcgcggcgtgtggactttgagactttcctgcccatgctccaggcagtggccaagaaccgaggccaaggcacatatgaggactacttggaggggtttcgtgtgtttgacaaggaggggaacggcaaagtcatgggagcagagctcagacatgttctcaccacccttggagagaagatgactgaggaggaggtggagaccgttctggcaggacacgaggacagcaacggctgcatcaactacgaggccttcttgaaacacatcctaagcgtctgagtgctgcagatccagtggggtccggacactgggccccgcaggcgaaagcacgttccagccaccaggaggccacctattgtttcaaaataaagactgggttcctctcttggtttca

SEQ ID NO: 194 - DNA, 619 bp, Homo sapiens
tctgcagagagaatggccagcaggaaggcggggacccggggcaaggtggcagccaccaagcaggcccaacgtggttcttccaacgtcttttccatgtttgaacaagcccagatacaggagttcaaagaagccttcagctgtatcgaccagaatcgtgatggcatcatctgcaaggcagacctgagggagacctactcccagctggggaaggtgagtgtcccagaggaggagctggacgccatgctgcaagagggcaagggccccatcaacttcaccgtcttcctcacgctctttggggagaagctcaatgggacagaccccgaggaagccatcctgagtgccttccgcatgtttgaccccagcggcaaaggggtggtgaacaaggatgagttcaagcagcttctcctgacccaggcagacaagttctctccagctgaggtggagcagatgttcgccctgacacccatggacctggcggggaacatcgactacaagtcactgtgctacatcatcacccatggagacgagaaagaggaatgaggggcagggccaggcccacgggggggcacctcaataaactctgttgcaaaattggaaaaaaaaaaaaaaaaaaaaaaaa

SEQ ID NO: 195 - DNA, 1212 bp, Homo sapiens
ggagtccagacccgacggccggcccagttccacgcacccagcgagcccaagcgccttctccgcaccagggaagccccacccaccagaagccaagatgtccagcaagcgggccaaagccaagaccaccaagaagcggccacagcgggccacatccaatgtcttcgcaatgtttgaccagtcccagatccaggagtttaaggaggctttcaacatgattgaccagaaccgtgatggcttcattgacaaggaggacctgcacgacatgctggcctcgctggggaagaaccccacagacgaatacctggagggcatgatgagcgaggccccggggcccatcaacttcaccatgttcctcaccatgtttggggagaagctgaacggcacggaccccgaggatgtgattcgcaacgcctttgcctgcttcgacgaggaagcctcaggtttcatccatgaggaccacctccgggagctgctcaccaccatgggtgaccgcttcacagatgaggaagtggacgagatgtaccgggaggcacccattgataagaaaggcaacttcaactacgtggagttcacccgcatcctcaaacatggcgccaaggataaagacgactaggccaccccagccccctgacaccccagcccccgccagtcacccctccccgcacacacccgtccataccagctccctgcccatgaccctcgctcagggatccccctttgaggggttagggtcccagttcccagtggaagaaacaggccaggagaagtgcgtgccgagctgaggcagatgttcccacagtgaccccagagccctgggctatagtctctgacccctccaaggaaagaccaccttctggggacatgggctggagggcaggacctagaggcaccaagggaaggccccattccggggctgttccccgaggaggaagggaaggggctctgtgtgccccccaggaggaagaggccctgagtcctgggatcagacaccccttcacgtgtatccccacacaaatgcaagctcaccaaggtcccctctcagtccccttccctacaccctgaccggccactgccgcacacccacccagagcacgccacccgccatgggagtgtgctcaggagtcgcgggcagcgtggacatctgtcccagagggggcagaatctccaatagaggactgagcactgctaaaaaaaaaaaaaaaaaaaaaaaaa

SEQ ID NO: 196 - DNA, 7645 bp, Homo sapiens
ggcgctgagcgagctcggagcccgcgctgtgcgcctgcggccggggcgccccgccgagcgccggtgccccggctcccgggccgccttcgccgcgcgggaaggattcttcaaaattaacagaaaccaattcgggccagctgaagagaaaaaataaaggtggctcccggctgcctctgctgcagttcagagcaacttcaggagcttcccagccgagagcttcaggacgcctttcctgtcccactggcccagttgccacaacaaacaacagagaagacggtgaccatgggggatgtgaagctggttgcctcgtcacacatttccaaaacctccctcagtgtggatccctcaagagttgactccatgcccctgacagaggcccctgctttcattttgccccctcggaacctctgcatcaaagaaggagccaccgccaagttcgaagggcgggtccggggttacccagagccccaggtgacatggcacagaaacgggcaacccatcaccagcgggggccgcttcctgctggattgcggcatccgggggactttcagccttgtgattcatgctgtccatgaggaggacaggggaaagtatacctgtgaagccaccaatggcagtggtgctcgccaggtgacagtggagttgacagtagaaggaagttttgcgaagcagcttggtcagcctgttgtttccaaaaccttaggggatagattttcagctccagcagtggagacccgtcctagcatctggggggagtgcccaccaaagtttgctaccaagctgggccgagttgtggtcaaagaaggacagatgggacgattctcctgcaagatcactggccggccccaaccgcaggtcacctggctcaagggaaatgttccactgcagccgagtgcccgtgtgtctgtgtctgagaagaacggcatgcaggttctggaaatccatggagtcaaccaagatgacgtgggagtgtacacgtgcctggtggtgaacgggtcggggaaggcctcgatgtcagctgaactttccatccaaggtttggacagtgccaataggtcatttgtgagagaaacaaaagccaccaattcagatgtcaggaaagaggtgaccaatgtaatctcaaaggagtcgaagctggacagtctggaggctgcagccaaaagcaagaactgctccagcccccagagaggtggctccccaccctgggctgcaaacagccagcctcagcccccaagggagtccaagctggagtcatgcaaggactcgcccagaacggccccgcagaccccggtccttcagaagacttccagctccatcaccctgcaggccgcaagagttcagccggaaccaagagcaccaggcctgggggtcctatcaccttctggagaagagaggaagaggccagctcctccccgtccagccaccttccccaccaggcagcctggcctggggagccaagatgttgtgagcaaggctgctaacaggagaatccccatggagggccagagggattcagcattccccaaatttgagagcaagccccaaagccaggaggtcaaggaaaatcaaactgtcaagttcagatgtgaagggcttgccgtgatggaggtggccccctccttctccagtgtcctgaaggactgcgctgttattgagggccaggattttgtgctgcagtgctccgtacgggggaccccagtgccccggatcacttggctgctgaatgggcagcccatccagtacgctcgctccacctgcgaggccggcgtggctgagctccacatccaggatgccctgccggaggaccatggcacctacacctgcctagctgagaatgccttggggcaggtgtcctgcagcgcctgggtcaccgtccatgaaaagaagagtagcaggaagagtgagtaccttctgcctgtggctcccagcaagcccactgcacccatcttcctgcagggcctctctgatctcaaagtcatggatggaagccaggtcactatgactgtccaagtgtcagggaatccaccccctgaagtcatctggctgcacaatgggaatgagatccaagagtcagaggacttccactttgaacagagaggaactcagcacagcctttgtatccaggaagtgttcccggaggacacgggcacgtacacctgcgaggcctggaacagcgctggagaggtccgcacccaggccgtgctcacggtacaagagcctcacgatggcacccagccctggttcatcagtaagcctcgctcagtgacagcctccctgggccagagtgtcctcatctcctgcgccatagctggtgacccctttcctaccgtgcactggctcagagatggcaaagccctctgcaaagacactggccacttcgaggtgcttcagaatgaggacgtgttcaccctggttctaaagaaggtgcagccctggcatgccggccagtatgagatcctgctcaagaaccgggttggcgaatgcagttgccaggtgtcactgatgctacagaacagctctgccagagcccttccacgggggagggagcctgccagctgcgaggacctctgtggtggaggagttggtgctgatggtggtggtagtgaccgctatgggtccctgaggcctggctggccagcaagagggcagggttggctagaggaggaagacggcgaggacgtgcgaggggtgctgaagaggcgcgtggagacgaggcagcacactgaggaggcgatccgccagcaggaggtggagcagctggacttccgagacctcctggggaagaaggtgagtacaaagaccctatcggaagacgacctgaaggagatcccagccgagcagatggatttccgtgccaacctgcagcggcaagtgaagccaaagactgtgtctgaggaagagaggaaggtgcacagcccccagcaggtcgattttcgctctgtcctggccaagaaggggacttccaagacccccgtgcctgagaaggtgccaccgccaaaacctgccaccccggattttcgctcagtgctgggtggcaagaagaaattaccagcagagaatggcagcagcagtgccgagaccctgaatgccaaggcagtggagagttccaagcccctgagcaatgcacagccttcagggcccttgaaacccgtgggcaacgccaagcctgctgagaccctgaagccaatgggcaacgccaagcctgccgagaccctgaagcccatgggcaatgccaagcctgatgagaacctgaaatccgctagcaaagaagaactcaagaaagacgttaagaatgatgtgaactgcaagagaggccatgcagggaccacagataatgaaaagagatcagagagccaggggacagccccagccttcaagcagaagctgcaagatgttcatgtggcagagggcaagaagctgctgctccagtgccaggtgtcttctgaccccccagccaccatcatctggacgctgaacggaaagaccctcaagaccaccaagttcatcatcctctcccaggaaggctcactctgctccgtctccatcgagaaggcactgcctgaggacagaggcttatacaagtgtgtagccaagaatgacgctggccaggcggagtgctcctgccaagtcaccgtggatgatgctccagccagtgagaacaccaaggccccagagatgaaatcccggaggcccaagagctctcttcctcccgtgctaggaactgagagtgatgcgactgtgaaaaagaaacctgcccccaagacacctccgaaggcagcaatgccccctcagatcatccagttccctgaggaccagaaggtacgcgcaggagagtcagtggagctgtttggcaaagtgacaggcactcagcccatcacctgtacctggatgaagttccgaaagcagatccaggaaagcgagcacatgaaggtggagaacagcgagaatggcagcaagctcaccatcctggccgcgcgccaggagcactgcggctgctacacactgctggtggagaacaagctgggcagcaggcaggcccaggtcaacctcactgtcgtggataagccagaccccccagctggcacaccttgtgcctctgacattcggagctcctcactgaccctgtcctggtatggctcctcatatgatgggggcagtgctgtacagtcctacagcatcgagatctgggactcagccaacaagacgtggaaggaactagccacatgccgcagcacctctttcaacgtccaggacctgctgcctgaccacgaatataagttccgtgtacgtgcaatcaacgtgtatggaaccagtgagccaagccaggagtctgaactcacaacggtaggagagaaacctgaagagccgaaggatgaagtggaggtgtcagatgatgatgagaaggagcccgaggttgattaccggacagtgacaatcaatactgaacaaaaagtatctgacttctacgacattgaggagagattaggatctgggaaatttggacaggtctttcgacttgtagaaaagaaaactcgaaaagtctgggcagggaagttcttcaaggcatattcagcaaaagagaaagagaatatccggcaggagattagcatcatgaactgcctccaccaccctaagctggtccagtgtgtggatgcctttgaagaaaaggccaacatcgtcatggtcctggagatcgtgtcaggaggggagctgtttgagcgcatcattgacgaggactttgagctgacggagcgtgagtgcatcaagtacatgcggcagatctcggagggagtggagtacatccacaagcagggcatcgtgcacctggacctcaagccggagaacatcatgtgtgtcaacaagacgggcaccaggatcaagctcatcgactttggtctggccaggaggctggagaatgcggggtctctgaaggtcctctttggcaccccagaatttgtggctcctgaagtgatcaactatgagcccatcggctacgccacagacatgtggagcatcggggtcatctgctacatcctagtcagtggcctttcccccttcatgggagacaacgataacgaaaccttggccaacgttacctcagccacctgggacttcgacgacgaggcattcgatgagatctccgacgatgccaaggatttcatcagcaatctgctgaagaaagatatgaaaaaccgcctggactgcacgcagtgccttcagcatccatggctaatgaaagataccaagaacatggaggccaagaaactctccaaggaccggatgaagaagtacatggcaagaaggaaatggcagaaaacgggcaatgctgtgagagccattggaagactgtcctctatggcaatgatctcagggctcagtggcaggaaatcctcaacagggtcaccaaccagcccgctcaatgcagaaaaactagaatctgaagaagatgtgtcccaagctttccttgaggctgttgctgaggaaaagcctcatgtaaaaccctatttctctaagaccattcgcgatttagaagttgtggagggaagtgctgctagatttgactgcaagattgaaggatacccagaccccgaggttgtctggttcaaagatgaccagtcaatcagggagtcccgccacttccagatagactacgatgaggacgggaactgctctttaattattagtgatgtttgcggggatgacgatgccaagtacacctgcaaggctgtcaacagtcttggagaagccacctgcacagcagagctcattgtggaaacgatggaggaaggtgaaggggaaggggaagaggaagaagagtgaaacaaagccagagaaaagcagtttctaagtcatattaaaaggactatttctctaaaactcaaaaaaaaaaaaaaaactcaagatagtaaaagcacctagtgtgatagattatcggttaggtcatttgtgggttgattcttcagaaacagcagttgatacctagcagcgttattgatgggcattaatctatgttagttggcaccttaagatactagtgcagctagatttcatttagggaaatcaccagtaacttgactgaccaattgattttagagagaaagtaaccaaaccaaatatttatctgggcaaagtcataaattctccacttgaatgcgctcatgaaaaataaggccaaaacaagagttctgggccacagctcagcccagagggttcctggggatgggaggcctctctctccccaccccctgactctagagaactgggttttctcccagtactccagcaattcatttctgaaagcagttgagccactttattccaaagtacactgcagatgttcaaactctccatttctctttccccttccacctgccagttttgctgactctcaacttgtcatgagtgtaagcattaaggacattatgcttcttcgattctgaagacaggtccctgctcatggatgactctggcttccttaggaaaatatttttcttccaaaatcagtaggaaatctaaacttatcccctctttgcagatgtctagcagcttcagacatttggttaagaacccatgggaaaaaaaaaatccttgctaatgtggtttcctttgtaaaccaggattcttatttgtgctgttatagaatatcagctctgaacgtgtggtaaagatttttgtgtttgaatataggagaaatcagtttgctgaaaagttagtcttaattatctattggccacgatgaaacagatttcaactgataaagagctggagaactccatgtactttggaatctcctccaagatagccagagtttaatacatcttcattctcaacactctccaaagaacttgacctaccttatgggttccatatttttcttcttaaatgtgcatcaatcatgccttgcccccaacctttaaatatattcttagacctggtaaatgcactcagacttgcgtctttaggaatttttaactttctttcactacattggcacttaaattttttctttataaagctttttgaaggtcataaacaaagaccataattgatgatagacctaatacatttcctctgtgtgtgtgtgtaacattccaaatactttttttttcttttccactgtttgtaaggtgcaacaatttaatatttttaagggactttttaagagttccttaagaaccaatttaaaattacttcagtgcaatcctacacagtatcaacattagaattttgatattagtcttatgttatcttccattctatttttatctgctttttgctgctagtttcaaactgccagtatttttccttttgcttttaaaatagttacaatatttttcatgatagccacagtattgccacagtttattataataaagggtttttatttgatttagcgcattcaaagcttttttctatcacttttgtgttcagaatataacctttgtgtgcgtgtatgttgtgtgtgtgcatgtgtggcgtatatgtgtgttacaggttaatgccttcttggaattgtgttaatgttctcttggtttattatgccatcagaatggtaaatgagaacactacaactgtagtcagctcacaatttttaaataaaggataccacagtgcatgctgtttgttcaaaaaaaaaaaaaaaaaa

SEQ ID NO: 197 - DNA, 2683 bp, Homo sapiens
atggcgacagaaaatggagcagttgagctgggaattcagaacccatcaacagacaaggcacctaaaggtcccacaggtgaaagacccctggctgcagggaaagaccctggccccccagacccaaagaaagctccggatccacccaccctgaagaaagatgccaaagcccctgcctcagagaaaggggatggtaccctggcccaaccctcaactagcagccaaggccccaaaggagagggtgacaggggcggggggcccgcggagggcagtgctgggcccccggcagccctgccccagcagactgcgacacctgagaccagcgtcaagaagcccaaggctgagcagggagcctcaggcagccaggatcctggaaagcccagggtgggcaagaaggcagcagagggccaagcagcagccaggaggggctcacctgcctttctgcatagccccagctgtcctgccatcatctccagttctgagaagctgctggccaagaagcccccaagcgaggcatcagagctcacctttgaaggggtgcccatgacccacagccccacggatcccaggccagccaaggcagaagaaggaaagaacatcctggcagagagccagaaggaagtgggagagaaaaccccaggccaggctggccaggctaagatgcaaggggacacctcgagggggattgagttccaggctgttccctcagagaaatccgaggtggggcaggccctctgtctcacagccagggaggaggactgcttccagattttggatgattgcccgccacctccggcccccttccctcaccgcatggtggagctgaggaccgggaatgtcagcagtgaattcagtatgaactccaaggaggcgctcggaggtggcaagtttggggcagtctgtacctgcatggagaaagccacaggcctcaagctggcagccaaggtcatcaagaaacagactcccaaagacaaggaaatggtgttgctggagattgaggtcatgaaccagctgaaccaccgcaatctgatccagctgtatgcagccatcgagactccgcatgagatcgtcctgttcatggagtacatcgagggcggagagctcttcgagaggattgtggatgaggactaccatctgaccgaggtggacaccatggtgtttgtcaggcagatctgtgacgggatcctcttcatgcacaagatgagggttttgcacctggacctcaagccagagaacatcctgtgtgtcaacaccaccgggcatttggtgaagatcattgactttggcctggcacggaggtataaccccaacgagaagctgaaggtgaactttgggaccccagagttcctgtcacctgaggtggtgaattatgaccaaatctccgataagacagacatgtggagtatgggggtgatcacctacatgctgctgagcggcctctcccccttcctgggagatgatgacacagagaccctaaacaacgttctatctggcaactggtactttgatgaagagacctttgaggccgtatcagacgaggccaaagactttgtctccaacctcatcgtcaaggaccagagggcccggatgaacgctgcccagtgtctcgcccatccctggctcaacaacctggcggagaaagccaaacgctgtaaccgacgccttaagtcccagatcttgcttaagaaatacctcatgaagaggcgctggaagaaaaacttcattgctgtcagcgctgccaaccgcttcaagaagatcagcagctcgggggcactgatggctctgggggtctgagccctgggcgcagctgaagcctggacgcagccacacagtggccggggctgaagccacacagcccagaaggccagaaaaggcagccagatccccagggcagcctcgttaggacaaggctgtgccaggctgggaggctcggggctccccacgcccccatgcagtgaccgcttccccgatgtgagccgcctcggagtgtggcctggatccatcctgctagcacctccccagacagggctccagcctgtcggccacaccccagactccaggcccccgttgaagccgctcccggttccctccccagctcctcgtctttgaactgccgccgccgtggtgacccctgctttgccccactgggagagtccttagcctgggcctcctcctagctggagtgccatggctggggggtctcagcatgtagggcttctgtggttgtggatgggaggctcctggtggggcagaaaggctgcaacgctgattcctaaggcccagctgccagggaagacagagcaggctttgtgagagaggacctccatgcccccgccacctccccactccagcagataaggccgagcccacaccatctggcccaggctggcccccacccaccttccttgcgaccaccaacacacaggaactctgtgtgagagagagggcgcccagcccaggcctggtggagggggaggggagaagccaagggacacaggagaccacccccgagcttgcctcagggccaagccggcccaacccaaccactcggggcccccatcttgggggtcacccatggcctcagatgatggggtcagcaggcccaggagaattaggaaggccatggggcagcctccagtctgctctcagcttgtgccttgtaaataaatgtacaggttggatgtgg

SEQ ID NO: 198 - DNA, 7998 bp, Homo sapiens
aggagtctgtcagctacggaggacaatgaccttgcagacaccaccgcctgagtgagaaccaggggtctgtgcctctcctcattccccgctcttgcccttgtcaagcctgcaccagcatgtcaggaacctccaaggagagtctggggcatggggggctgccagggttgggcaagacctgcttaacaaccatggacacaaagctgaacatgctgaacgagaaggtggaccagctcctgcacttccaagaagatgtcacagagaagttgcagagcatgtgccgagacatgggccacctggagcggggcctgcacaggctggaggcctcccgggcaccgggcccgggcggggctgatggggttccccacattgacacccaggctgggtggcccgaggtcctggagctggtgagggccatgcagcaggatgcggcccagcacggtgccaggctggaggccctcttcaggatggtggctgcggtggacagggccatcgctttggtgggggccacgttccagaaatcaaaggtggcggatttcctcatgcaggggcgtgtgccctggaggagaggcagcccaggtgacagccctgaggagaataaagagcgagtggaagaagagggaggaaaaccaaagcatgtgctgagcaccagtggggtgcagtctgatgccagggagcctggggaagagagccagaaggcggacgtgctggaggggacagcggagaggctgccccccatcagagcgtcagggctgggagctgaccccgcccaggcagtggtctcaccgggccagggagatggtgttcctggcccagcccaggcattccctggccacctgcccctgcccacaaaggtggaagccaaggctcctgagacacccagcgagaacctcaggactggcctggaattggctccagcacccggcagggtcaatgtggtctccccgagcctggaggttgcaccaggtgcaggacaaggagcatcgtccagcaggcctgaccctgagcccttagaggaaggcacgaggctgactccagggcctggccctcagtgcccagggcctccagggctgccagcccaggccagggcaacccacagtggtggagaaacacctccaaggatctccatccacatacaagagatggatactcctggggagatgctgatgacaggcaggggcagccttggacccaccctcaccacagaggctccagcagctgcccagccaggcaagcagggcccacctgggaccgggcgctgcctccaagcccctgggactgagcccggagaacagacccctgaaggagccagagagctctccccgctgcaggagagcagcagccccgggggagtgaaggcagaggaggagcaaagggctggggccgagcctggcacgagaccaagcttggccaggagtgacgacaatgaccacgaggttggggccctgggcctgcagcagggcaaaagcccaggggcgggaaaccctgagcctgagcaggactgtgcagccagggctccggtgagagctgaagcagtaaggaggatgcccccaggcgccgaggctggcagcgtggttctggatgacagtccggccccaccagctccttttgaacaccgggtagtgagcgtcaaggagacctccatctctgcgggttacgaggtgtgccagcacgaagtcttgggagggggtcggtttggccaggtccacaggtgcacagagaagtccacaggcctcccactggctgccaagatcatcaaagtgaagagcgccaaggaccgggaggacgtgaagaacgagatcaacatcatgaaccagctcagccacgtgaacctgatccagctctatgacgccttcgagagcaagcacagctgcacccttgtcatggagtacgtggacgggggtgagctcttcgaccggatcacagatgagaagtaccacctgactgagctggatgtggtcctgttcaccaggcagatctgtgagggtgtgcattacctgcaccagcactacatcctgcacctggacctcaagccggagaacatattgtgcgtcaatcagacaggacatcaaattaagatcattgactttgggctggccagaaggtacaagcctcgagagaagctgaaggtgaacttcggcactcctgagttcctggccccagaagtcgtcaattatgagtttgtctcattccccacagacatgtggagtgtgggagtcatcacctacatgctactcagtggcttgtccccatttctaggggaaacagatgcagagaccatgaatttcattgtaaactgtagctgggattttgatgctgacacctttgaagggctctcggaggaggccaaggactttgtttcccggttgctggtcaaagagaagagctgcagaatgagtgccacacagtgcctgaaacacgagtggctgaataatttgcctgccaaagcttcaagatccaaaactcgtctcaaatcccaactactgctgcagaaatacatagctcaaagaaaatggaagaaacatttctatgtggtgactgctgccaacaggttaaggaaatttccaacttctccctaatcttcaactctgctgctccaatgggtccagaaattactgaggccagtggtgaagtgaagagatgactcaaacatttaaataatttggctttttggtattattgattccacttattttgtaaaaatggttatggctgctgccttccttgtggatgaaaagtggctgtaaagaagcttcctaagaacgtttttttctgccttgtaagatcactacgtgtgaaatgctctgagtacctttcaaatatacctacttttggtggtaagtgtagggatgctttaggtaggtactttgcatctgtcgaatttaaattctaaactcacactgattaaggaactcagtagactactttgcaggggccatgttattcagtgttatctcctccagtacaaagaattcctagaattttgatttgctcaggtgtgagctgacattttattgtactaccccattcttgtgttaagccatgtggatttaggacagtgatcttcaaacttgctttaacttatgctcccttttgagaatcagcatcacttgaaatgtcaaaatatgtcaactctcatagccaaatcaaagaagtgatcattttgactgtgctttttaaatctccacacacctccacctctctcctaattctgcctgtcttaacccctctgtcttagttataaatttctggtcttgtaagtctggaagctgataggcaatttatgaaagagataagaatgtaatgaggttccgctttctgagaaacacagaaatgatacatcctgagacataaaggaaagctgctcttctgctgcctcaggctgtagcactctcaatgttgtcactctacacatacactttctatatacatgtacagttgacccttgaacagggtttgaattgcagtcaacttaaatgtggattttctttcacctttgtcacccctgagacagcaacaccatgctctcctcttcatcccactctgcagcctactcaacaggaagatgatgaagatgaacacctttatgatgatccactttcacttaatgaatagtaaacatatgttttcctccttatgattttagtaacttttctctagcttactttattgtaagaatacagtatataagctgggtgtggtggctcatgcccataatcccagcactttgggaggctgaggcaggcagatcacttgaggtcaggagttcaagaccagcctggccaacacagtgaaaccccatctctactaaaaatacaaaaattagtggggcgtggtggcggatgcctgtaatgtcagctactctggaggctgaggcaggagaactgcttgaacctgggaggtggagtttgcagtgagccaagattgcaccactgcactccagcctaggcaacagagcaagactccgtctcaaaaaaaaaaaaaaaaaagaatacagtatatgtatatatacacacacacaaacacacacacacacgaacacatatgtgtgtatgggtattaactgactgtttatattattgatagggcttccagtcaacattaggctattagtagttaagtttttggggagacaaaagttatactcagattttctactgcaagggggtaggcactcctaaccctcacattgttcaagggtccactgtacatttaaacacttttctatatgcattagagtagccctgtcatcccttcactgaaatcatactgttctcaacatggcaagcaactaacacttttttttttttttgagacagggtctcactctgttgcccaggctgcagtgcagtggtgtgatcttggctcactgtagcctccgcctcctgggctcaggcgatcatgagtacctgggaccataggtgcccgctactacacccagctaatttttgtatttttagtggagatagggttttgccatgttgcccaacctggtcttgagctcaagcgatccacctgccccagcctcccaaagtgctgggattataggtgtgagccaccacacccagcttcaactaacacatttacgaacttgtatacatgtatatttagatactttaccaacttgtaaaatggttaaaggagtactttattatgaaaaaatatacaatctttaaaatttccttacttctacatgatttttgtgctattcccatttttttcctcaggtgagcagctttagttttttattttttttgagagagtcttcctctgtcacccaggctggagtgcactggtgtgttcttggctcactgcaacctctgcctcccgggttcaagtgatcttgtgcctcagcctcccaggtagctgggattacaggcgtgtgctgccacgcccagctaatttttgtatttttggtagagatggggttttgccatgttggccaggctggtctcgaactcctgacctcagatgatccacctgtcttggcctcccaaagagctgggaatataggcatgagccactgtgcttggcctcaggtgagcagctttagtcaatgttgtgaattttagattttaattagacatgcaacagtttcactacctttcaggatttttgtcctgtaacagaggctcttgctttttgacagagaggtaggcaggtggagaggttatcctgctgctgcagttctcaagttgttaagtttcctctggaaggctaacccttgttgggaactaacagtttcaataccagcaagtctaggcctgctccaagttggtcagctgaagaatgaacatcagaagacacagctgctgaaagttgtcctttgatgagacagtgatagtgatttggtaaaatgtcttattttttaaatgtcagttatctttctttaaaaggttttttgagggcagcctccagaaggagctagagagtatattttatagttctattgtggttcataccctgttttcgacttaagattctggagaatgctatgaaacatctccccagaaaaagacagttaattaccatatctagagcagcactgcccaacaaaaatatagtacaggctatacacataattaaaacatttctagtagcttctctaacaaaacccattgaaagccaattttaataatttatataacttagtgtatcaaaaatatttcaatatgtaatcaacataaaattgagatactttaccagctactagggaggctgaggccagagaatcacttgaacccagggggtggaggttgcagtgagccaagatcacaccattgaactccagcctgggcaacaagagcaaaactccgtctcaaaaaaaaagagatattttatattctttttctcatactaagtctcaaaaatctggtatattttacacttaaaaacacatgtcaaggctaggcatggtggctcacatctgtaatcccagcactttgggaggccaaggtgggcagattgctggccaacatggtaaaaccccatctctaaaaatataaaaattagctgggcgtggtggcgcatacctgtaatcccagctacttgggaggctaaggcacaagaatcacttaaacaggaggcaggggttgcagtgagctgagatcacaccactgcactccagcctgggtggcagagcaaaactttgtccccacccctgacaaaaaacaaacaaacaaacaaaacaaaaaaaaacctgtcaattcagatgctaggttttcatcagacgtacttaatctgtatttagatttcttaaaacttactgtggaaaatgtatttacatactcaagttgtttgaaacataactcactgttttccaataactgaagtatccacttttacatgtattaaaattaaataaaattagaaattcagttctgcagttgcactagccacattttaagtgtttaatagccacacgtggttagtggcatctatattggacagggcagatctagagagaatcctgtatctaacaattttaatttttttccctttatgctgttattccttacctagagaaacaatttccctccaaagttcctttgaggggtctgtttaggccaggccaacacaagtgacctatgtggattttagcatcctttttttgaaatttgaggttttatgaagcttgagtttttctggatatttttagtaatttgctggtgtgtacttagctcaaatacttgattgcaactgtgttgggtcaactatttctaatgggacttttccatttgcatgtacagtcactggaaactgctgggcagagaaactctaaaaggtagttggggcacactttttccacctgtcagattggtgaagaattggtgaggctgtggggaaaatggcattctcccacttttgatggatatgtatccaaataaaagtcattcccatgctttctttcatccagaaattttatttctagaaatttatccctccgtacttgaacaattgtatagagatttattcaaaatgatgtttactatagcactgttgctaatggcccagtaaaaacaaccaacacatgcctattagtttggttttagttaaatgaattttgccacatccatgtagtggaatacctcacagctgttatagatagatctagatatactgaaagccattttttcttaaattatagaatgtatatatggtatcatcccatttgtgaagagacatatgcttatatgtgcattaaaaaaccgtaggatatgcaagaaacttaacagtggagtgtgaaaagtgggtgattgggagagggggaattccacttttcatttatctttctgaaccttttgaatcttttttttttttttttttacaatgagcatgtattcctttttttttttttctttccaagatggagtctcactctgttgccaggctggagtgcagtggcgcaatcttggcttactgcaacatccacctcccgagttcaagtgatttctcctgcctcagcctcccaagtagctgggactacaggcatgcgccaccacgcccagctaatttttgtgtttttagtagagatgggctttcaccatgctggccaggatggtctcgatctcttgacctcgtgatctgcccacctcggcctcccaaagtgctgggattacaggtgtgagccactgcgcctggcccgcatgtattacatttataattaaaaattcacaactcaatgtcaagtgtgaaccttgtgttgaccctgatttgagcaagcaataaaaagatatttttgagacatttagattatgaatttcacatttgatgatagttactattaattttgtgaggtgtgatattggcaatgtggttagatgacttcagagaaaaaggaaggtatagttaagcaagtatggcaacatctaataacttgggtctaggtgatgtgtatgggtttcattatactgtcctctttactgttgtatgtatttgaaaacattcatgacaaaaaaactttttaatcagttaaataaaccatgaagaacggttaaagaa

SEQ ID NO: 199 - DNA, 2732 bp, Homo sapiens
ctttcgcctcagtctcgagctctcgctggccttcgggtgtacgtgctccgggatcttcagcacccgcggccgccatcgccgtcgcttggcttcttctggactcatctgcgccacttgtccgcttcacactccgccgccatcatggtgaagctcgcgaaggcaggtaaaaatcaaggtgaccccaagaaaatggctcctcctccaaaggaggtagaagaagatagtgaagatgaggaaatgtcagaagatgaagaagatgatagcagtggagaagaggtcgtcatacctcagaagaaaggcaagaaggctgctgcaacctcagcaaagaaggtggtcgtttccccaacaaaaaaggttgcagttgccacaccagccaagaaagcagctgtcactccaggcaaaaaggcagcagcaacacctgccaagaagacagttacaccagccaaagcagttaccacacctggcaagaagggagccacaccaggcaaagcattggtagcaactcctggtaagaagggtgctgccatcccagccaagggggcaaagaatggcaagaatgccaagaaggaagacagtgatgaagaggaggatgatgacagtgaggaggatgaggaggatgacgaggacgaggatgaggatgaagatgaaattgaaccagcagcgatgaaagcagcagctgctgcccctgcctcagaggatgaggacgatgaggatgacgaagatgatgaggatgacgatgacgatgaggaagatgactctgaagaagaagctatggagactacaccagccaaaggaaagaaagctgcaaaagttgttcctgtgaaagccaagaacgtggctgaggatgaagatgaagaagaggatgatgaggacgaggatgacgacgacgacgaagatgatgaagatgatgatgatgaagatgatgaggaggaggaagaagaggaggaggaagagcctgtcaaagaagcacctggaaaacgaaagaaggaaatggccaaacagaaagcagctcctgaagccaagaaacagaaagtggaaggcacagaaccgactacggctttcaatctctttgttggaaacctaaactttaacaaatctgctcctgaattaaaaactggtatcagcgatgtttttgctaaaaatgatcttgctgttgtggatgtcagaattggtatgactaggaaatttggttatgtggattttgaatctgctgaagacctggagaaagcgttggaactcactggtttgaaagtctttggcaatgaaattaaactagagaaaccaaaaggaaaagacagtaagaaagagcgagatgcgagaacacttttggctaaaaatctcccttacaaagtcactcaggatgaattgaaagaagtgtttgaagatgctgcggagatcagattagtcagcaaggatgggaaaagtaaagggattgcttatattgaatttaagacagaagctgatgcagagaaaacctttgaagaaaagcagggaacagagatcgatgggcgatctatttccctgtactatactggagagaaaggtcaaaatcaagactatagaggtggaaagaatagcacttggagtggtgaatcaaaaactctggttttaagcaacctctcctacagtgcaacagaagaaactcttcaggaagtatttgagaaagcaacttttatcaaagtaccccagaaccaaaatggcaaatctaaagggtatgcatttatagagtttgcttcattcgaagacgctaaagaagctttaaattcctgtaataaaagggaaattgagggcagagcaatcaggctggagttgcaaggacccaggggatcacctaatgccagaagccagccatccaaaactctgtttgtcaaaggcctgtctgaggataccactgaagagacattaaaggagtcatttgacggctccgttcgggcaaggatagttactgaccgggaaactgggtcctccaaagggtttggttttgtagacttcaacagtgaggaggatgccaaagctgccaaggaggccatggaagacggtgaaattgatggaaataaagttaccttggactgggccaaacctaagggtgaaggtggcttcgggggtcgtggtggaggcagaggcggctttggaggacgaggtggtggtagaggaggccgaggaggatttggtggcagaggccggggaggctttggagggcgaggaggcttccgaggaggcagaggaggaggaggtgaccacaagccacaaggaaagaagacgaagtttgaatagcttctgtccctctgctttcccttttccatttgaaagaaaggactctggggtttttactgttacctgatcaatgacagagccttctgaggacattccaagacagtatacagtcctgtggtctccttggaaatccgtctagttaacatttcaagggcaataccgtgttggttttgactggatattcatataaactttttaaagagttgagtgatagagctaacccttatctgtaagttttgaatttatattgtttcatcccatgtacaaaaccattttttcctacaaatagtttgggttttgttgttgtttcttttttttgttttgtttttgttttttttttttttgcgttcgtggggttgtaaaagaaaagaaagcagaatgttttatcatggtttttgcttcagcggctttaggacaaattaaaagtcaactctggtgccagaaaaaaaaaaaaaaaa

SEQ ID NO: 200 - DNA, 14239 bp, Homo sapiens
tgcaacggaaacttttggctccacgaacagaaaagcaagagcaaaaactcagttaaatgcgttcttcctccatctttgcctagtccaaaaggaaaaaaaaagaaacagaaaaaagaaaaactgtttggaagagtagcgttgaggtttgctttttacctgtttttcctctagaacagccaggtggattcacatgatccaattttttaattgtcttctatgtcccactccgaataacccggatgccccagcacaatcagagagatcgttttttttaaaaaaaatttcagcctccaaaggtaggaggggagtgttaggggagaaagtactttaattaaaaatcaataactcgaggtttttgggatacggtttgccatttcctaattaagaaatgggtttgacagtccctttgtacacactgctatgcaaaccccaaagggttggcggctgtccgggcgatgacactccggtcccctgcgagaccccgggccagccaggcccgtccgccgccggcctctggggtccgtccccggctcgcgcagacctctcgcttctctcggctctgtctcctgcgctcagctctgctcggggccggccgcctcaggctcgccgccaccaggtcgttgcaaataccttttccctccccggggccccagcgcgcggccacctcccagcctccccccctcccaccctggcagcggggccctttcccggctcaggaacagcagcagcccgggccgcgccggcaggaagcgaggcccatgttgctgctgttccctggcgcgcctccccgccctccgggggccgccacggctcttccgcgctcccgggcacccccctccgcgcctgcgctgtgccccacgggggcggggctcagattcctgtcagcggcggcggcggtggcggcgaccgtcagttttcgctgaggagaaacacgaaacggaccctttggctctcccccttccccttccccgtcctgaacccctctcctggtcaccgagaatcagtccccgtggagttccccctccacctcgccatcgtttcctcggtcctcggcccagtggaagtcactaccctcgaggaggaggcagcggcagccgccctcgcgtcgccgcccccggttcggtgcccgcggtcccggagaggaggtgccgccgccaccgccgctccccccctcccgctgccctcgggccgggctgggtcgagctgcgatgccctcggacttcatctcattgctcagcgcggacctagacctggaatcgcccaagtccctctactcgcgagattctctgaagttacacccatcacagaattttcatagagctggactattggaagaatctgtctatgatcttctcccaaaggagttacagttacctccatctagagaaacatctgtagcatcaatgagtcagacaagcggtggtgaggcaggctcgcctcctccagctgttgttgctgctggatttgcctctgaagcagggagtgtctgcattaaaaatgacctgtagttctctgcttcatagatgcttcttcagctccctcctcttcctccatgggcggtgcttgcagctcctttaccacctcttccagccctaccatttattctacctcagtcaccgacagcaaggctatgcaagtggagagctgctcctcagccgtgggggtaagtaacagaggggtaagtgaaaagcagttaaccagtaacacagttcagcagcatccatcaacaccgaagaggcacacagtcttgtacatctcaccaccacctgaggacttgctggataacagtcggatgtcctgccaggatgaggggtgtggattggaatctgagcagagctgcagtatgtggatggaggattccccctccaacttcagtaacatgagcaccagttcctacaatgataacactgaggtacctcgtaaatcacgaaaacgaaatccaaagcagaggccgggggtcaaacgacgagattgtgaagaatctaatatggatatatttgatgccgacagtgccaaagcacctcactatgtgctttctcagcttaccacggacaacaaaggcaactcaaaagcgggaaatggaacattggaaaaccaaaaaggaactggagtaaagaagagccctatgttgtgtggacaatatcctgttaaaagtgagggaaaggagctgaagatagttgtacaacctgagacacagcaccgagctcggtacctgactgagggcagccgtggctcagtgaaagatagaacacagcaaggctttcctacagtaaagctggaaggccataatgaacctgtagtgttgcaagtgtttgtgggcaacgactctggacgagtgaaaccacatggattttatcaggcctgcagagtaactggacgaaatacaactccttgcaaagaagtggacattgaaggcactactgttatagaagtcggccttgatcctagcaacaacatgacactggcggtggactgcgtagggatattgaaattgaggaatgctgatgtcgaagccagaataggaattgctggttccaagaagaaaagcactcgtgccagattggtttttcgagttaatatcatgaggaaagatggctccactttgacactgcaaacaccctcttctccaattttgtgtactcagccagcaggagtgccagaaatcttaaagaaaagcttgcatagctgttcagtgaaaggagaagaagaagtgtttttaatcggcaagaactttctgaaaggaactaaagttattttccaagaaaatgtttctgatgaaaactcttggaagtcagaagctgaaattgatatggaactatttcatcagaatcatcttattgtgaaggttcctccctatcatgaccaacatataactttgcctgtgtcagtgggaatatatgtagtgacaaatgctggaagatctcatgatgttcaaccattcacttacactccagacccagcagcagctggtgctttgaatgtaaatgtgaagaaggaaatatctagtccagcaagaccttgctcttttgaagaggccatgaaagcaatgaaaactactggatgtaatttagataaggtaaatattatccctaatgccctgatgactccactcataccaagcagtatgattaagagtgaagatgttactccaatggaagtaacagcagaaaaaagatcttccactatttttaagactacaaagtctgttggatcaactcagcaaacattagaaaacatctcaaacatagcaggaaatggctctttttcatcaccatcatcttcccacctaccttctgaaaatgaaaaacagcagcagattcagcccaaggcatacaacccagagaccctgacaactattcaaacccaggacatctcacagcctggtacttttccagcagtttctgcttctagtcagctgcccaacagcgatgcactattgcagcaggctacacagtttcagacaagagaaactcagtctagagagatattacagtcagatggtacagtggttaatttgtcacaactgactgaggcatcacaacaacagcagcagtcaccactacaagaacaagcacagactttacagcagcagatttcatcaaatatttttccatcaccaaatagtgtgagtcagcttcagaatactattcagcagctgcaagcagggagtttcacaggcagtactgctagtggcagcagtggaagtgttgacttggtccaacaagttttagaggcacagcagcagttatcttcagttttattttctgctccagatggtaatgagaatgttcaagagcagcttagtgcagatatttttcaacaagtcagtcaaattcagagtggtgtaagccctggaatgttttcctcaacagagccaacagtccataccagaccagataatttattacctggaagagctgaaagtgttcatccacagtctgaaaacacgttatctaatcaacagcagcagcagcagcagcaacagcaagtgatggaatcttcagccgcaatggtgatggagatgcaacagagtatctgccaggcagctgcccagattcagtcagagttattcccttcaactgcttcagcaaatggaaaccttcagcaatcgccagtttaccagcagacttctcacatgatgagtgcattgtctaccaatgaggatatgcaaatgcagtgtgaattgttttcttctcctcctgcagtttctggaaatgaaacttctacaactaccacacagcaggttgcaacccctggcactaccatgtttcagacatcaagttcaggagatggagaagaaactggaacacaagcaaaacagattcagaacagtgtctttcagaccatggtccaaatgcaacatagtggggacaatcaacctcaagttaaccttttttcatccacaaaaagtatgatgagtgttcagaatagtggtacccaacaacaaggtaatggtttattccagcaagggaatgagatgatgtcacttcaatctggaaattttttgcagcagtcttctcattcacaggcccaactttttcatcctcaaaatcctattgccgatgctcagaacctttcccaggaaactcaaggttctctctttcatagtccaaatcctattgtccacagtcagacttctacaacctcctctgaacaaatgcagcctccaatgtttcactctcaaagtaccattgctgtgttacagggctcttcagttcctcaagaccagcagtcaaccaacatatttctttcccagagtcccatgaataatcttcagactaacacagtagcccaagaagcattttttgcagcaccgaactcaatttctccacttcagtcaacatcaaacagtgaacaacaagctgctttccaacagcaagctccaatatcacacatccagactcctatgctttcccaagaacaggcacaacccccgcagcagggtttatttcagcctcaggtggccctgggctcccttccacctaatccaatgcctcaaagccaacaaggaaccatgttccagtcacagcactcaatagttgccatgcagagtaactctccatcccaggaacagcagcagcagcagcaacagcagcagcaacagcagcagcaacaacaacagagcattttattcagtaatcagaataccatggctacaatggcgtctccaaagcaaccaccaccaaacatgatattcaacccaaatcaaaatccaatggctaatcaggagcaacagaaccagtcaatttttcaccaacaaagtaacatggccccaatgaatcaagagcaacagcccatgcaatttcagagtcagtccacagtttcctcacttcagaacccaggtcctacccagtcggaatcatcacagacccccttgttccatagctctcctcagattcagttggtacaagggtcacctagttctcaagagcagcaagtaactctcttcttatctccagcatccatgtctgccttgcagaccagtataaatcaacaagatatgcaacagtctcctctttattcccctcagaacaacatgcctggaattcaaggagccacatcttcgcctcaaccacaggctactttatttcacaacacagcaggaggcacaatgaaccaactgcagaattctcctggctcatctcagcagacatcaggaatgttcttatttggcattcaaaataactgtagtcagcttttaacctctggaccagctacattgcctgatcagttgatggccataagtcagccaggccaaccacaaaacgagggccagccacctgtgacaacacttctttctcagcaaatgccagagaattctccactggcatcctctataaacaccaaccagaacatcgaaaagattgatttgcttgtttcattgcaaaaccaagggaacaacttgactggctccttttaactggatataaattccacgaagaaaatcctgattccaagatgtcctgagatcttgtggttccatgagaattattactttaaaaacaaaacaaaatataaaaaactgtgtttgagtaaactgatagattttactctgactgcaaaagagcacacctatgctgcttgttgcagtaactaaccaccaatgttaacatcttcatattttatattcctaataacagtgatgactgagaatctatttgagtttccagctggcagaattaattgttattattttcctaggcgcaatttccttaaacgtacagtttaaattcaaggctggaccactcagttattattgctattagaaaataatatatcatgtttacttttgttcttcattattttctttcctgcattgttttagtcaagtaatggcttttgaaaaagtaaagttcaataataactaaggctgtgatttttttcaatataaaaggcacagctgttggccaaagtgaaggaatcttttttcagttttattggagaaactgaagggtaacattctaacaagtaaactgtatgtgcagataaaagtactcttgatttaacacaaaggcagatgatacacttataaaactgggaacagctggaatgcttcttgattttattttttcagagagttgttagttctctgggtttctactaaggggtttagccataactgtgcatagaaaaataattatctgtaaaaaatgaaggggataatatatgataaattatgttctgatatcctcctacagtagtttaaattgacagaaaaatttgaatgttttcttcttaacccagtcttaggctggtattccctttttatatatatctatattacttttcacctctttttcactttactttagagaactattaatatactactggcttcatgaccctgtagcatctttggccactttaatctagggtgacctagcaatcctgcagcacagggcagagagtactgtcttaggaattattaggagttgattcctgagaaacaacacatttttccccatgaacggtgctgttctgaagtcttcaaatttttccctctaataggaaacagtataaattttaattaaaaaaaaaaggcaaactaaaatttcttgaaatatcacttctccctgatctgcagtgagtataaattcacttgtcacctcagtgctttacagtttgaagtggtcacttacctgatggttcccacaagccttaggctttacagggttgtatcattgacttaaaatgaagaattaacttgtgttacatctataaagagcaaaataacacactccagaacttggcagttgtagcattagttatacagttttgggtgttcttgccacccgtgggatgcctgcttctcactaccacctgtgtctggacacatgcttatgtctcattttccttttggcatgtggaaagctgtcaatgcagtgtaaggccaacgtgtgtgtggcttctatgtgttgagataatgttttggtatccttgtccgtttcatttattttttaagtgtacaaaaaataacctgttaattgttgaaggctacttttctgttctttttttttttttttttctatcctgtacatttagttgaactgtgcggaattgtggtgttggttttgtttacacagccagatttttccttctttttgttttgtgatgatcttcctttgttctttgaatgtgctcttttgtctttttctcttttttctcatgttttcttccctccacctccacccctttctttctttctctctctgattgagaggcattgaattacgttttcagtagtacaggcttcttgccgatatgaagggaacttttcagaaagagacctactctgggtcatttaattttgaatacagttttcaatcgttcaagttttggatggtttatatctaatgtgtgtttcatttttttggaaagctatattttgtatttaggaaatggtatactattttgctatttgtactgagtgagtacattggcataaatatagaaatttatatatatacatatatataaactattcttttttgccacacatttttgtggtaaatttgtgagtttgtctgatgttctaccacaacgtggcgtctgataacagtgagggggggtggggtttgttatgtctttattgagtatttaagtatcttttgaaacaaatgacctgttcatctgtggccattccatcaggcagttagttccttgatgtcagtagtgggctaaaggcagcttactgtgtgtttgctggagctttcactcagccaagtgttagagtcaggaaacccattgaggcaatggcgtcaaatggtgtttcacaagaatgagccattcagtctttgctcactatatatttaatattttattattgttgttattgttattattaattggctttctgtattctatgccttttatttataaagacactaagaaaacccatgtttgtaattttaataacatttttcccatcttgtaatatccagagctactttataaattctctgaaccaaaagtattttcctcagtgtatctcttctcccccagcccctattgggaaaaattacccagtatagttcaggttatgaggaggatcagccacacaatccagtgcttcagtttgaaaatgtaaaattctaaccctaaagtagggttggttgaaatttcagacaaagcaaacccagcaggtataaaaagtagtataaatacaaatctgtaagttatttttgaattttctgaacttttttctaagagattacataggagactaaagaaatctatctgttcaagttctaattaggatgattgttaatactgcactgtggatgaagtggcgactggcttgtgtgctgacttctgtggtttagcaagaggtttattgttatcaaatgctaattggcaatgccaagtcactgggaccaattttctgttttataatatctaagtttagaacagaatatatacctgaactgtagtggtttgatcggatggagacagaaaacccgatttttattctcataaattttgtggttatttatacaagggctgtgctatgctaccatattcttgttcaataataataggtttgttgttttttttacattgttaaatgttccttacccctaaaggtcaatgttaagtacaacattctgaaaatacaatttggctacgaagagtattcatcttctttgaagctcagtggttgatatttgtgctaataatgcaatttcctgattactgttacaagttatagctacatatgggagagactcagtgagccagcaaaggccatagaaacaacaatttattaaatgtatttatggcagaaggacctaaataaactgtgagccaccttttcttctttatattgttacatttaagtgttcttgctttcagcaactcacattaatgcttggagcttatctctttctctctctctctctctctctctgtgtgtgtgtgtgtatgtgtgtgtgtgtgtgtgtgtgtttccttattgtcattccattatatatccacaccaacatgggtgacgataattcaaagtcatattttgcctctaagcttgatcatgttacctttatgattaaagtatcatgttatttagccaatgcaaatctgttttaaaacaaatagtttaaaaaaagaacaagtttttaagggctttattatagaagaagtattaatgaaggactttccttcctccctccctttcctcccctccctgcctcccttcttcccttccatctccccctcctccctgccttctttgtttctccttcccttattcctccctccctcctttctcccttccttcctttcttccattcatccttccttgccttttatttttattttttgtaatatcacatgtgctgtagtttggaattttattctagtgcatttcttgctcatcagaacctcagctaatctacctaggaaaaatagtatcaaaggaaatgagaaagttgtatctgagtccctccagaactaagataattctttttgaccatttaagcctttataaatgcgttttgaccatttaagcctttataaatgcttgttttaggaaagtgaatctgttagatgcatcaacaaataatgaccaggacaaaacgatttaataattaaagtctcaaatcaccatggttatacattttcaccagaaatagtaatcttacaatttttcatttttctgatgaagatttctgttccaatatctgtttcctaatagattttttaaattaattagctttcctctgctttatgaccacaggttttatccctaaccgagacagctgtcttatatctgcatgccttagactgtgtggagggactccatgaagaaagaccataggttagaaaaataactcatagtatataccctagtaagtgggttagtagaatctcataacatgtattaaaaagaggttttcttctctgcttgtttgtgtcactagagcaaaattgtagagataatgctcataatgcagtaaatatcagaataatatctacaatatcatttgtggatggtcccaggtcccagtgctctagttactttacttctttttttttttttgagatggagtcttgctctgtctctcaggctagagcagtgtgcgatctcagctcactgcagcctccacctcccaggttcaagcgattctcctgcctcagcctcccaagtagccaggattacaggcaccctccactaggcccggctaattttttttgtatttttttagtagagatggggttttgccatgttggccaggctggtttcgaactcctaacctccagtgatccacctgcctcggcgtcccaaagtgctaggattacaggcatgagccaccacatccggcctaattacttctttaatccccatttatttttatgccattctagcctcatttattaataaaattatgtttttactttctctttcaggaaattttttaaattaatattttatatctagatctaatgctatggaaaagtgcctttttatcatttataatttcatttttcactatttccaaaaacacataaacaaatagtttcagtaggtcccagcttttactttttccatttaaaccttcttttctccatttcttccctttggcttaagaataaaagaaaaggtacattgctagaattgtttctttgggagagggtaaaagattacagaattagactgttcagcctttatataaactaaatttgtcttcatctcaaccagctaatggtaggtcttatctgaatactcatgagaattttagcatctgtgaaactccatgcaccagatgtgtgtaaatttcaggaagaaagtgttgaaagcattttctctgatgttaattagatggaaataaatcactaaaacatagtttaggtaaagcctgattatgccacttttttttaactagacagggcaaagttgtttatgttagtgtacttcttgtctatcctcagttaatttacctagacaaaaagtgtcaaaggaaatgagaaaaaggttatatctgactccctccagacctaagataattccttttgatcagatacagtcagatggagtgccttggtttttgttaattttgcctctattccagctccttaccacagcggtggtgcttaaagaaaggatcatcagcaacaggtcaggatagttctacctttgggatagggctgctttccccgtgctagtatttctgtgactgttagtggcactgaggactgcaaacttttatgcaatattcttaataccctattgatattatgcactttaatcattccaaagaagccaagaatgctgtatagtgatgattccttcctaatgaattcatcttaactatttagaatgttatgtcccttttcttttggatagccaacttggtataaatgttatatggatttttctaaaatgactatataggacttaagactttgaaatgtaatttacttataaggggaaataattatgctttagcacatcattttagaaacgtcacattttagaaacattcagcttgctaacctacatgtttgggaattcattaaaaccagttgtctatatattttgtgccatgtatataagaacattacaatatatctttttctacatatgtagtatgtgcaaccagtggttctcagagtatggttctcagcccaccagctagtatcagtatcacctgggaactagttagaaatgtaaattctttggccccatcccagacatactgagtcagaaactctggaatagggcccccgcaatctgttttcacaagccctccaggtgattctgatgcacactttaaagtttaggaaccactgggctaagactctgttgagatatagagtttttcttccactcagactgatatagttatacattgttcttcatgtaaattcagcttaacctggttatctataatcttttattggcaaaagttaattctcagtactgcctatagagatacagtgtattttatgtacatacacaattagtctaattcttgataattcagttaatttagtttggcattttcctaccacttactaaaaggtttacattaaatgactgatttaaatatataggtgcaatgttctatgtttattttaattgttatgacatttaagtagctaatataattgaccggtgctaaagtctcctgtttatccataaaatgggtacattatgggcagtgtaatacaagctttcttttcattgcctagtactttaccagcagaccacagttttgccctggctagaccaaccctcagaacaaaatcatcattccttgtatttatatttgtatctgagatagtaaacaagatggctggccaggtcaacatggcaccttaacttatttttttaataggtaaaacttcttcaaaagtagcttgctttgtataagaactaagctatcagtatagatatagctatccttggagcttatgtttcagacaagaattatttactaaaataaataataaacaagataatgcattatacaatttgggcatttctcgtttctcaagtgtatgcatcatggtaaatataaactaaccacaagataggtagattgattcatttcattttaatctccttgtgtaattcagtacctccataattgttctaatcttcttcccactgtttacaaattaccagttaattaactcgtgaaagaaaaattcacatatcagaataaaaataaatgtatactcactttataaaaatcaccactgctgtctttccttaatactagcagtggaaatgtaagtggcttactctacaaattttggtgctggcaaatacataggcaaactgttgggagctgctctagttacattcctcccttcttattccctttttctcttcctcactttattgcataacatattcctgtacccaaagcattctaccacagttctatttgactcccacttgtaataactcctttaaaaaattccatgtttaaccatatgaccctgcttgcttactcatattctccctccctctccccttcctttctctctcttccagaagtcatttgcctggtttgaaatattttgtagggattgcttattatattattttagctgatgaacctcaggacaacgtctacacacacacacatacatacacgcacacaaaatctcagctgttgaagagtgggcttggaatcagacttctgtgtccagtaaaaaactcctgcactgaagtcattgtgacttgagtagttacagactgattccagtgaacttgatctaatttcttttgatctaatgaatgtgtctgcttaccttgtttccttttaattgataagctccaagtagttgctaattttttgacaactttaaatgagtttcattcacttcttttacttaatgttttaagtatagtaccaataatttcattaacctgttctcaagtggtttagctaccattctgccatttttaatttttatttaattttatttgcttgagcacactgatcaaccactgaactgccttcttccattgtcctgcaatgatataagggttacatttttgtgtatatggctttcatagttgggatttcagagcactgataccagatattttcagtttgttctctgggggaatttcatttgcatctatgtttttagctatctgtgataacttgttaaatattaaaaagatattttgcttctattggaacatttgtatactcgcaactatatttctgtaaacagctgcagtcaaaaataaaacactgaaagttaaaaaaaaaaaaaaaaaaaa

SEQ ID NO: 201 - DNA, 3671 bp, Homo sapiens
ggcgggcgctcggcgactcgtccccggggccccgcgcgggcccgggcagcaggggcgtgatgtcacggcagggagggggcgcgggagccgccgggccggcggggaggcgggggaggtgttttccagctttaaaaaggcaggaggcagagcgcggccctgcgtcagagcgagactcagaggctccgaactcgccggcggagtcgccgcgccagatcccagcagcagggcgcgggcaccggggcgcgggcagggctcggagccaccgcgcaggtcctagggccgcggccgggccccgccacgcgcgcacacgcccctcgatgactttcctccggggcgcgcggcgctgagcccggggcgagggctgtcttcccggagacccgaccccggcagcgcggggcggccgcttctcctgtgcctccgcccgccgctccactccccgccgccgccgcgcggatgccaagcaccagctttccagtcccttccaagtttccacttggccctgcggctgcggtcttcgggagaggagaaactttggggcccgcgccgcgcgccggcggcaccatgaagtcagcggaggaagcccgaccctgcccgccctggactggcagctgccgtcccactcaggcccgtatgagcttcggattgaggtgcagcccaagtcccaccaccgagcccactacgagacggagggcagccggggggccgtgaaggcgtcggccggaggacaccccatcgtgcagctgcatggctacttggagaatgagccgctgatgctgcagcttttcattgggacggcggacgaccgcctgctgcgcccgcacgccttctaccaggtgcaccgcatcacagggaagaccgtgtccaccaccagccacgaggccatcctctccaacaccaaagtcctggagatcccactcctgccggagaacagcatgcgagccgtcattgactgtgccggaatcctgaaactcagaaactccgacattgaacttcggaaaggagagacggacatcgggaggaagaacacacgggtacggctggtgttccgcgttcacgtcccgcaacccagcggccgcacgctgtccctgcaggtggcctccaaccccatcgaatgctcccagcgctcagctcaggagctgcctctggtggagaagcagagcacggacagctatccggtcgtgggcgggaagaagatggtcctgtctggccacaacttcctgcaggactccaaggtcattttcgtggagaaagccccagatggccaccatgtctgggagatggaagcgaaaactgaccgggacctgtgcaagccgaattctctggtggttgagatcccgccatttcggaatcagaggataaccagccccgttcacgtcagtttctacgtctgcaacgggaagagaaagcgaagccagtaccagcgtttcacctaccttcccgccaacgttccaattataaaaacagaacccactgatgattatgagcctgctccaacctgtggaccggtgagccaggggttaagtcctctcccaagaccatactacagccagcagctcgcgatgccacccgaccccagctcctgcctcgtggccggcttcccgccctgtccgcagagaagcaccctgatgccagcggcccctggcgtgagccccaagctccacgacctttctcccgctgcctacaccaagggcgttgccagcccgggccactgtcacctcggactcccgcagccggccggagaggcccccgccgtccaggacgtgcccaggccagtggccacgcaccccggctcgcccgggcagccacccccggccctgctgccacagcagtaaatgaaataatacgaaatgacctctccagcacgagcacccactcctagttgccacattggagcactcagttcagcaggggtatgctgacttcagcagacaaagacttttgaataaataaactgaactcacacctggtaccactcagaacctccaactgactgaatgccaggagctgaacattaatatgtgcaaagattggctctccaacaagaaggaaagcagggaggaagggagaccactgtgtcacctggaggagaagtcatctcatgacaacagaagggaggtggccgggctgagcacgggagacccaccgtgcaggggcctttcatgggaacggcccacacgcagtttgaccccacgcccagcccttctggcacccctggggttcaatactggaagtgccttatttaaccagaccatcagggcatcatagaattgagcattgaatttgctactgtaggagtatttttaggagcagaaactgcaaacacatttcattgtgaggttttaccctctgtatgaatgaagagaacgctggaaggctgcgagaggactctagtatgagtctccaacatttggaacgtttcctgggctgtcacgtacactcctgctgccttacacagtgcattttagaatcttccagtctgtcatctcagctcttttgtaacatgcttcccttgtctgcgcggttgaaaccgtaggcttgttcatagtcgcatgctcgcatctttgtttttaatctggcttcgaacatagcacaagtaacttgaatagcacatcaataggttactggacaaaagcagaaaaacctgttacaggatagcctgcatttgcatgtgtgtacatatctaggcatctatttatgtataaataataacagagccgacgtgtcctcgcccaggagggcttccctgtcagcaataaccggcatccgttttggaacctgcgtctggggctccagtcgctgctcttgctggcgtccatcgccgcctcggacggccgtgcattttctcgtctcacgcagttcgaggaggaccctagaaagccaggagctgtgattgacagtagctgtaggttaccagacggcaacattagaaagtgattgtaaataacatgcaacctaagtgtaatatatttgttcagttataagatgattgtttcacagaagccttaccactctctgcttcatctaagaaaaccaataccaaaaacgccactttaatgctcagccctgcgttgtgtgttttcagatgagttactgttaacaggtaggtttgtgtaggccttgctgggcactctgtacaattagttgcttattacgtatgattactcacagcgatctattgttccatataaccaaaaagcatggtttattcattgaaacacggttgacctgaactcgtgccttaggaattaatgcccccttatggaacctgcctgaattgcacctgcgggtggaggctccggctgtgaagtcactgaacagaacgtcgctgatggagaaagggctcccgcagaaggaacggcctgtaccgtgcgctccggcacaatcgcgtctcttgtgtctcactcacggaaagaaacaacctgaaggccatcccgtcggtctgcacgtaaccgtgaagacgtgtggccgcgtcccacctgcggctgggtaccctgcacccggcactgtaggagtcacgtgcagcctttctcaggggactgtcattgaaaaggaaacgtttgatgtctgtgtcagctgtctttgtagttaggaaatagatccaataaagccgtatttttttgctggaaaaaaaaaaaaaaaaaaaaaaaaaaaaaaaaaaaaaaaaaaaaaaa

SEQ ID NO: 202 - DNA, 3166 bp, Homo sapiens
agcaggaagctcgcgccgccgtcgccgccgccgctcagcttccccgggcgcgtccaggacccgctgcgccaggcgcgccgtccccggacccggcgtgcgtccctacgaggaaagggaccccgccgctcgagccgcctccgccagccccactgcgaggggtcccagagccagccgcgcccgccctcgcccccggccccgcagccttcccgccctgcgcgccatgaacgcccccgagcggcagccccaacccgacggcggggacgccccaggccacgagcctgggggcagcccccaagacgagcttgacttctccatcctcttcgactatgagtatttgaatccgaacgaagaagagccgaatgcacataaggtcgccagcccaccctccggacccgcataccccgatgatgtcctggactatggcctcaagccatacagcccccttgctagtctctctggcgagccccccggccgattcggagagccggatagggtagggccgcagaagtttctgagcgcggccaagccagcaggggcctcgggcctgagccctcggatcgagatcactccgtcccacgaactgatccaggcagtggggcccctccgcatgagagacgcgggcctcctggtggagcagccgcccctggccggggtggccgccagcccgaggttcaccctgcccgtgcccggcttcgagggctaccgcgagccgctttgcttgagccccgctagcagcggctcctctgccagcttcatttctgacaccttctccccctacacctcgccctgcgtctcgcccaataacggcgggcccgacgacctgtgtccgcagtttcaaaacatccctgctcattattcccccagaacctcgccaataatgtcacctcgaaccagcctcgccgaggacagctgcctgggccgccactcgcccgtgccccgtccggcctcccgctcctcatcgcctggtgccaagcggaggcattcgtgcgccgaggccttggttgccctgccgcccggagcctcaccccagcgctcccggagcccctcgccgcagccctcatctcacgtggcaccccaggaccacggctccccggctgggtacccccctgtggctggctctgccgtgatcatggatgccctgaacagcctcgccacggactcgccttgtgggatcccccccaagatgtggaagaccagccctgacccctcgccggtgtctgccgccccatccaaggccggcctgcctcgccacatctacccggccgtggagttcctggggccctgcgagcagggcgagaggagaaactcggctccagaatccatcctgctggttccgcccacttggcccaagccgctggtgcctgccattcccatctgcagcatcccagtgactgcatccctccctccacttgagtggccgctgtccagtcagtcaggctcttacgagctgcggatcgaggtgcagcccaagccacatcaccgggcccactatgagacagaaggcagccgaggggctgtcaaagctccaactggaggccaccctgtggttcagctccatggctacatggaaaacaagcctctgggacttcagatcttcattgggacagctgatgagcggatccttaagccgcacgccttctaccaggtgcaccgaatcacggggaaaactgtcaccaccaccagctatgagaagatagtgggcaacaccaaagtcctggagatacccttggagcccaaaaacaacatgagggcaaccatcgactgtgcggggatcttgaagcttagaaacgccgacattgagctgcggaaaggcgagacggacattggaagaaagaacacgcgggtgagactggttttccgagttcacatcccagagtccagtggcagaatcgtctctttacagactgcatctaaccccatcgagtgctcccagcgatctgctcacgagctgcccatggttgaaagacaagacacagacagctgcctggtctatggcggccagcaaatgatcctcacggggcagaactttacatccgagtccaaagttgtgtttactgagaagaccacagatggacagcaaatttgggagatggaagccacggtggataaggacaagagccagcccaacatgctttttgttgagatccctgaatatcggaacaagcatatccgcacacctgtaaaagtgaacttctacgtcatcaatgggaagagaaaacgaagtcagcctcagcactttacctaccacccagtcccagccatcaagacggagcccacggatgaatatgaccccactctgatctgcagccccacccatggaggcctggggagccagccttactacccccagcacccgatggtggccgagtccccctcctgcctcgtggccaccatggctccctgccagcagttccgcacggggctctcatcccctgacgcccgctaccagcaacagaacccagcggccgtactctaccagcggagcaagagcctgagccccagcctgctgggctatcagcagccggccctcatggccgccccgctgtcccttgcggacgctcaccgctctgtgctggtgcacgccggctcccagggccagagctcagccctgctccacccctctccgaccaaccagcaggcctcgcctgtgatccactactcacccaccaaccagcagctgcgctgcggaagccaccaggagttccagcacatcatgtactgcgagaatttcgcaccaggcaccaccagacctggcccgcccccggtcagtcaaggtcagaggctgagcccgggttcctaccccacagtcattcagcagcagaatgccacgagccaaagagccgccaaaaacggacccccggtcagtgaccaaaaggaagtattacctgcgggggtgaccattaaacaggagcagaacttggaccagacctacttggatgatgttaatgaaattatcaggaaggagttttcaggacctcctgccagaaatcagacgtaaaagaagccattatagcaagacaccttctgtatctgacccctcggagccctccacagcccctcaccttctgtctcctttcatgttcatctcccagcccggagtccacacgcggatcaatgtatgggcactaagcggactctcacttaaggagctcgccacctccctcta

SEQ ID NO: 203 - DNA, 3901 bp, Homo sapiens
cggctgcggttcctggtgctgctcggcgcgcggccagctttcggaacggaacgctcggcgtcgcgggccccgcccggaaagtttgccgtggagtcgcgacctcttggcccgcgcggcccggcatgaagcggcgttgaggagctgctgccgccgcttgccgctgccgccgccgccgcctgaggaggagctgcagcaccctgggccacgccgatgactactgcaaactgtggcgcccacgacgagctcgacttcaaactcgtctttggcgaggacggggcgccggcgccgccgcccccgggctcgcggcctgcagatcttgagccagatgattgtgcatccatttacatctttaatgtagatccacctccatctactttaaccacaccactttgcttaccacatcatggattaccgtctcactcttctgttttgtcaccatcgtttcagctccaaagtcacaaaaactatgaaggaacttgtgagattcctgaatctaaatatagcccattaggtggtcccaaaccctttgagtgcccaagtattcaaattacatctatctctcctaactgtcatcaagaattagatgcacatgaagatgacctacagataaatgacccagaacgggaatttttggaaaggccttctagagatcatctctatcttcctcttgagccatcctaccgggagtcttctcttagtcctagtcctgccagcagcatctcttctaggagttggttctctgatgcatcttcttgtgaatcgctttcacatatttatgatgatgtggactcagagttgaatgaagctgcagcccgatttacccttggatcccctctgacttctcctggtggctctccagggggctgccctggagaagaaacttggcatcaacagtatggacttggacactcattatcacccaggcaatctccttgccactctcctagatccagtgtcactgatgagaattggctgagccccaggccagcctcaggaccctcatcaaggcccacatccccctgtgggaaacggaggcactccagtgctgaagtttgttatgctgggtccctttcaccccatcactcacctgttccttcacctggtcactcccccaggggaagtgtgacagaagatacgtggctcaatgcttctgtccatggtgggtcaggccttggccctgcagtttttccatttcagtactgtgtagagactgacatccctctcaaaacaaggaaaacttctgaagatcaagctgccatactaccaggaaaattagagctgtgttcagatgaccaagggagtttatcaccagcccgggagacttcaatagatgatggccttggatctcagtatcctttaaagaaagattcatgtggtgatcagtttctttcagttccttcaccctttacctggagcaaaccaaagcctggccacacccctatatttcgcacatcttcattacctccactagactggcctttaccagctcattttggacaatgtgaactgaaaatagaagtgcaacctaaaactcatcatcgagcccattatgaaactgaaggtagccgaggggcagtaaaagcatctactgggggacatcctgttgtgaagctcctgggctataacgaaaagccaataaatctacaaatgtttattgggacagcagatgatcgatatttacgacctcatgcattttaccaggtgcatcgaatcactgggaagacagtcgctactgcaagccaagagataataattgccagtacaaaagttctggaaattccacttcttcctgaaaataatatgtcagccagtattgattgtgcaggtattttgaaactccgcaattcagatatagaacttcgaaaaggagaaactgatattggcagaaagaatactagagtacgacttgtgtttcgtgtacacatcccacagcccagtggaaaagtcctttctctgcagatagcctctatacccgttgagtgctcccagcggtctgctcaagaacttcctcatattgagaagtacagtatcaacagttgttctgtaaatggaggtcatgaaatggttgtgactggatctaattttcttccagaatccaaaatcatttttcttgaaaaaggacaagatggacgacctcagtgggaggtagaagggaagataatcagggaaaaatgtcaaggggctcacattgtccttgaagttcctccatatcataacccagcagttacagctgcagtgcaggtgcacttttatctttgcaatggcaagaggaaaaaaagccagtctcaacgttttacttatacaccagttttgatgaagcaagaacacagagaagagattgatttgtcttcagttccatctttgcctgtgcctcatcctgctcagacccagaggccttcctctgattcagggtgttcacatgacagtgtactgtcaggacagagaagtttgatttgctccatcccacaaacatatgcatccatggtgacctcatcccatctgccacagttgcagtgtagagatgagagtgttagtaaagaacagcatatgattccttctccaattgtacaccagccttttcaagtcacaccaacacctcctgtggggtcttcctatcagcctatgcaaactaatgttgtgtacaatggaccaacttgtcttcctattaatgctgcctctagtcaagaatttgattcagttttgtttcagcaggatgcaactctttctggtttagtgaatcttggctgtcaaccactgtcatccataccatttcattcttcaaattcaggctcaacaggacatctcttagcccatacacctcattctgtgcataccctgcctcatctgcaatcaatgggatatcattgttcaaatacaggacaaagatctctttcttctccagtggctgaccagattacaggtcagccttcgtctcagttacaacctattacatatggtccttcacattcagggtctgctacaacagcttccccagcagcttctcatcccttggctagttcaccgctttctgggccaccatctcctcagcttcagcctatgccttaccaatctcctagctcaggaactgcctcatcaccgtctccagccaccagaatgcattctggacagcactcaactcaagcacaaagtacgggccaggggggtctttctgcaccttcatccttaatatgtcacagtttgtgtgatccagcgtcatttccacctgatggggcaactgtgagcattaaacctgaaccagaagatcgagagcctaactttgcaaccattggtctgcaggacatcactttagatgatgtgaacgagataattgggagagacatgtcccagatttctgtttcccaaggagcaggggtgagcaggcaggctcccctcccgagtcctgagtccctggatttaggaagatctgatgggctctaacagtgcttactgcagccttgtgtccaccaccaacttctcagcatgtttctctccttggaccttgggtttccaactctgcagccttcaggtctggggccaggagtgggacccaccatttgtggggaaagtagcattcctccacctcaggccttgggtagatttggcaaaagaacaggagcagcataggctgtttgagctttggggaaatgaactttgctttttatatttaactaggatacttttatatgatgggtgctttgagtgtgaatgcagcaggctctcttgtttccgaggtgctgcttttgcaggtgacctggttacttagctaggattggtgatttgtactgctttatggtcatttgaagggccctttagtttttatgataatttttaaaataggaacttttgataagaccttctagaagcaaaaaaaaaaaaaaaaaaaaaaaaaagaaaaaaaaag

SEQ ID NO: 204 - DNA, 4944 bp, Homo sapiens
gggaggacgaggggcgcgtggttttcccatctcatccctggaggaggggctggagcatccccggcagccaatcagggacaggctgggggggggaccgctttgaagaagtttgggggaaaaaagtttggaaaagtttctataataacgaggggctggagggaggcggcagcgacggaggagggggcttctcagagaaagggagggagggagccacccgggtgaagatacagcagcctcctgaactcccccctcccacccaggccgggacctgggggctcctgccggatccatgggggcggccagctgcgaggatgaggagctggaatttaagctggtgttcggggaggaaaaggaggcccccccgctgggcgcggggggattgggggaagaactggactcagaggatgccccgccatgctgccgtctggccttgggagagccccctccctatggcgctgcacctatcggtattccccgacctccaccccctcggcctggcatgcattcgccaccgccgcgaccagccccctcacctggcacctgggagagccagcccgccaggtcggtgaggctgggaggaccaggagggggtgctgggggtgctgggggtggccgtgttctcgagtgtcccagcatccgcatcacctccatctctcccacgccggagccgccagcagcgctggaggacaaccctgatgcctggggggacggctctcctagagattaccccccaccagaaggctttgggggctacagagaagcagggggccagggtgggggggccttcttcagcccaagccctggcagcagcagcctgtcctcgtggagcttcttctccgatgcctctgacgaggcagccctgtatgcagcctgcgacgaggtggagtctgagctaaatgaggcggcctcccgctttggcctgggctccccgctgccctcgccccgggcctcccctcggccatggacccccgaagatccctggagcctgtatggtccaagccccggaggccgagggccagaggatagctggctactcctcagtgctcctgggcccaccccagcctccccgcggcctgcctctccatgtggcaagcggcgctattccagctcgggaaccccatcttcagcctccccagctctgtcccgccgtggcagcctgggggaagaggggtctgagccacctccaccacccccattgcctctggcccgggacccgggctcccctggtccctttgactatgtgggggccccaccagctgagagcatccctcagaagacacggcggacttccagcgagcaggcagtggctctgcctcggtctgaggagcctgcctcatgcaatgggaagctgcccttgggagcagaggagtctgtggctcctccaggaggttcccggaaggaggtggctggcatggactacctggcagtgccctccccactcgcttggtccaaggcccggattgggggacacagccctatcttcaggacctctgccctacccccactggactggcctctgcccagccaatatgagcagctggagctgaggatcgaggtacagcctagagcccaccaccgggcccactatgagacagaaggcagccgtggagctgtcaaagctgcccctggcggtcaccccgtagtcaagctcctaggctacagtgagaagccactgaccctacagatgttcatcggcactgcagatgaaaggaacctgcggcctcatgccttctatcaggtgcaccgtatcacaggcaagatggtggccacggccagctatgaagccgtagtcagtggcaccaaggtgttggagatgactctgctgcctgagaacaacatggcggccaacattgactgcgcgggaatcctgaagcttcggaattcagacattgagcttcggaagggtgagacggacatcgggcgcaaaaacacacgtgtacggctggtgttccgggtacacgtgccccagggcggcgggaaggtcgtctcagtacaggcagcatcggtgcccatcgagtgctcccagcgctcagcccaggagctgccccaggtggaggcctacagccccagtgcctgctctgtgagaggaggcgaggaactggtactgactggctccaacttcctgccagactccaaggtggtgttcattgagaggggtcctgatgggaagctgcaatgggaggaggaggccacagtgaaccgactgcagagcaacgaggtgacgctgaccctgactgtccccgagtacagcaacaagagggtttcccggccagtccaggtctacttttatgtctccaatgggcggaggaaacgcagtcctacccagagtttcaggtttctgcctgtgatctgcaaagaggagcccctaccggactcatctctgcggggtttcccttcagcatcggcaaccccctttggcactgacatggacttctcaccacccaggcccccctacccctcctatccccatgaagaccctgcttgcgaaactccttacctatcagaaggcttcggctatggcatgccccctctgtacccccagacggggcccccaccatcctacagaccgggcctgcggatgttccctgagactaggggtaccacaggttgtgcccaaccacctgcagtttccttccttccccgccccttccctagtgacccgtatggagggcggggctcctctttctccctggggctgccattctctccgccagccccctttcggccgcctcctcttcctgcatccccaccgcttgaaggccccttcccttcccagagtgatgtgcatcccctacctgctgagggatacaataaggtagggccaggctatggccctggggagggggctccggagcaggagaaatccaggggtggctacagcagcggcttccgagacagtgtccctatccagggtatcacgctggaggaagtgagtgagatcattggccgagacctgagtggcttccctgcacctcctggagaagagcctcctgcctgaaccacgtgaactgtcatcacctggcaaccccagccccagcctcagccctgccccctttccctccttcctggagtggtggctacagaagcttggggccaaccctggctcctctttccccagcttctgtctgtctcactgtcttccctcccctcccccagctgaggtgtggccctcaggcctggtgctgccttggagggctgggggaaggagtgtgtggaggagggaggagggtgaagactgaggctaggtgccagaatggactggagtgaaggcgtgtctagagtgtgggctggctgttgtgctggaaagctggggacaggttgatggtaataaactgctcaatgaccagtgcttcaggctccagagctctttggagagatgggttggggcagcttactccagccctggcccaaggaggcccagaagttggaaagagatggaatgtggctgggaacattgcatcccaaagagcttctcagtggaggaggctggggaaggcatgagggggctcagaggctccttgactgggaccaggattgggggccagggcttgagtaggcctctccactctcctccttgggggtccagattccttaggagctttgggatgaggcccaggaggctgcatttttccaggtccttagtcttgccaccacacagatgattctgattcatagccaagatgaggacacactgatgtagctgatctctcatttacagaggaggattctaaagttcagagagggaaaggggcttgcctgaggtcacgtagataatcagcagcacattgaacgctgcactcctgggctcctgtccccagcccccattcagacacgctgactcaggaggtccaggcctctaaggcttctctccctggagtgagggtggaggtgagggagagctggcacaagccctccctctggatcctccactcctggggattatgaagatattctggaaagatttgtgcttcagaggtagactgcagaaagcaaacagtctacccagcagctctgaatgtcacctgccctggggcttacagcactatatgagttcctggcctatcctgcaaatatgcccatgctggccttctaaatagctggtacatccatcaccactgacgggcctggcctggaaacctggtttgtcccctgtcttgatggcctacgagaggccaagttccactgggctgggaaaagtcactttgtctgtcttgttcacctggagcctgacacaccgtaggtactgagtacaaatagcttgatttggctaggcttggctgcagggggacgtgcctaaaagacattccgggcatttgcacttgggaaacttgcctcaccttcaggcttgtggggcctctctatgcccaatgagtccaggcagtcctagcaagtactcaggagagcaggggtgggtgtgacagaggctggctctggattgggggacaacagaaccagagtaactcctcgcctgttgctgctttgcaatgaatttcctttacctttctggaacacaagctgctgtgaaccaaactgatatcaagtgattagctcaccgggccttggttgcttttcaaagatccccttcagccccctgccagagtcactgccccataatcaccatgtcagaagggaccctagggcattcgtgtcctatttatcaatcttcagcaccacctctaagatctctgagagagggtggatcagcctctgtgtaaacaaaaagctgttaggacttgttgcctctcaaggtggactattctgttttctgccaggacactgccattcatgcattgtcagatatttattaaacagcagcaaagtgccagccaatttgtcctggaggaattcatagcctcatggggcaaaagtaaataaacagcttattacaattcaacaaaaaaaaaaaaaaaaaaaaaaaaaaaaaaaaaaaaaaaaaaaaaaaaa

SEQ ID NO: 205 - DNA, 2604 bp, Homo sapiens
gccaatgggcgcgcggggaggcgcgggccgcggcggcgggctgggggctcggcgctcccgggcgtcagtcgggccgcggcgacggcggcaggagcgcgtcccggcgccgcctcgggctccgctcggctcgggggctgcttcgggaggaggagagccaagggaggcgccaggcccgcgggccgggcgcatggcttagggacgctcccggccgccgcagccccagcatggggaaacttcactccaagccggccgccgtgtgcaagcgcagggagagcccggaaggtgacagcttcgccgtgagcgctgcctgggctcggaagggcatcgaggagtggatcgggagacagcgctgcccgggcggtgtctcgggaccccgacagctgcggttggcgggcaccataggccgaagcacccgggagctcgtgggcgacgtgttgagagacacgctcagcgaggaagaggaggacgactttcggctggaagtggccctgcctcctgagaagactgacgggctgggcagcggagatgagaagaagatggagagagtgagcgaaccctgcccaggctccaagaagcagctgaagtttgaagagctccagtgcgacgtgtccatggaggaggacagccggcaggagtggaccttcaccctgtatgactttgacaacaacggcaaggtcacccgagaggacatcaccagcttgctgcacaccatctatgaggtggtggactcctctgtcaaccactccccaacatccagcaagatgctgcgggtaaagctcaccgtggcccccgatggcagccagagcaagaggagcgtccttgtcaatcaggctgacctgcagagcgcaaggccccgagcagagaccaagcccactgaggacctgcggagctgggagaagaagcagcgagccccgctcaggttccagggtgacagccgcctggagcagtctggctgctaccaccattgcgtagatgagaacatcgagaggagaaaccactacttagatctcgccgggatagaaaactacacgtcccaatttgggcctggctccccttccgtggcccagaagtcagaactgcccccccgcacctccaatcccactcgatctcgctcccatgagccggaagccatccacatcccacaccgaaagccccaaggcgtggacccggcctccttccacttccttgacaccccaatcgccaaggtctcagagctccagcaacggctccggggcacccaggacgggagcaagcactttgtgaggtcccccaaggcccagggcaagagtgtgggtgtgggccacgtggccagaggggcaagaaacaagccccctctgggacccgccatccctgcggtgtccccctccgcccacctggctgccagcccggccctcctcccctccctagcccccctcgggcacaagaagcacaagcaccgagccaaggagagccagcagggctgccggggcctgcaggcaccactggcctcaggtggccctgtcctggggcgggagcacctgcgggagctgcccgccttggtggtgtatgagagccaggccgggcagccggtccagagacatgagcaccaccaccaccatgaacatcaccaccattaccaccacttctaccagacatagagcccctccccagggccccaccctgccatatgaaggaccccacccccgacaccacaaggcattattattctattaattattgttattatgatgattattgttattaataattattgttactccactaatatttagctagcctacatgtagaagatctatggaaacacagaactaaacttttatttatatgttgtggggactgcataactagcccaggaaatgactctggttttgagtggcctgtaatgggcagaggctccctcggggctcgggatctgcagcatctatgtggatcagcccacacccttcccagagccagggagcccttagcctcaactctgccccaccccagcctcttccaggagagcacccttacttggcccggcttccagagaccctcgaaatctccgagaagataaacagctgctacctcttagtattattctgattttattttgcccttaactgattgttatatgctacaagggatttcagtggactgcagagtgcgaacgtcttgctgttgtgtttttatgtcccaacctagaaaccttagctgtcttttctggagttgtctttcatgcttttccagtgggatcaagcccttttccccaagagtcccatctcttctgccatgcacgacatgaaaatccacttctcttccttctccttcttctctctctactttacagtgatacacacacgtatttaaggactatccctgagaccatccctctcattttggaaactgctagggagggaaccaaccacttaaacaagcgtggttttccaagatccaggcaattgtgtgctgttggttgtggtggaggatgtggcacatatatacgtacctacacggttctctaacagagctttctgtatctatagatagatgccatctgtccatttctatgtatctttctataaatatacactctcaggtatctttaaaaaaaaaaaaaaaaaa

SEQ ID NO: 206 - DNA, 1798 bp, Homo sapiens
cggcgatggggaaactgcagtcgaagcacgccgccgccgcccgcaagcggagagagagcccggaaggggacagcttcgtggcgtccgcgtacgcgagcggccgcaaaggcgcggaggaagcggagcggcgcgcgcgggacaagcaggagctgcccaatggggaccccaaggaggggcctttccgggaggaccagtgtcccctacaggtggcactccccgctgagaaagctgagggccgcgagcacccgggacaactcctcagcgcagatgacggagagagggcagcaaaccgcgagggcccgcgaggaccgggcgggcagcgcctcaacattgacgcactccagtgcgatgtctcggtggaggaggacgaccgccaggagtggacgttcacgctctatgactttgacaactgcgggaaggtcaccagggaggacatgtccagcctcatgcacaccatctatgaggtcgtggatgcctcggtcaaccactcctcgggcagcagcaagaccctccgtgtgaagctaaccgtcagccctgagccctccagcaagaggaaggagggtcctcctgctggccaggaccgggagcccacccgttgcaggatggagggtgaactggcagaggagccaagggtggctgacaggaggttgtctgcacacgtcaggaggcccagtactgacccccagccctgctcggagcgggggccctactgcgtggacgagaacacggagcgcagaaaccactacctggacctcgccgggattgagaactacacgtccagattcggccctgggtcccctcctgtgcaagcaaagcaggagccccagggcagggcctcgcacctccaggcccggtcccgctcccaggagccagatacacatgccgtacaccaccgcaggtcacaggtgctggtggaacacgtcgtgccagcctcggagcctgctgcccgggccctggacacgcagccccggccgaaggggccggagaagcagttcctcaagtcccccaagggctccgggaagccgcctggggtgccagccagcagcaagtccgggaaagccttcagctactacctgccggccgtcctgccgccccaggcccctcaggacggccaccacctcccgcagcccccaccgccaccctacggccacaagcggtaccgccaaaagggcagggagggccactcgccactcaaggccccacacgctcagcctgccacagtggagcacgaggtggtgcgggacctgccgcccacgccagcaggagagggctacgcggtgccagtgatccagcggcacgagcaccaccaccaccacgagcaccaccaccaccaccaccaccaccacttccacccgtcctagcgccactgccaagcacacctcgctcccagcacaccacggcccgcgacctcagggcagggagcagagcagctgccggctgtgtgcccatggggagcccagcccccaccccccacctccgacagcaaacagcaactgactgcaggtgctggcatgatggaggtggtgcaccttggacacgtggacaaggcccaggcgccctctgctcttctgccctcgatgccacatggcggtgaacacatctgaagccactatgtttcctggctctaaggctcgtctgtgtaacccataaaacctgctttgattccaaaatgaggccctggagtgcgcaaggagtgcccggatgcttggggtgggtgttcctcccggggcttcaaggggtgactgctgtaggctgtcccagtgcgaggccgggagcgaatggaaaagctgaggctttg

SEQ ID NO: 207 - DNA, 3555 bp, Homo sapiens
tttcccttttttttccttttggcaacccacacccttccacacacgctcaccccaaaattaaacaccaagatcctctaacttgtttggattgactgatgaagacataaagctctatgttttttgaggtggagtgagtggtttttcttcatttttaaatggccaaatgacagcttgacccagtttgctttccaatcaaagggcatttattttgaatgtctctttgtggcgcaagagccaacgcaaaaatgatggcggcttacaatggcggtacatctgcagcagcagcaggtcaccaccaccaccatcaccaccaccttccacacctccctcctcctcacctgcaccaccaccaccaccctcaacaccatcttcatccggggtcggctgccgctgtacaccctgtacagcagcacacctcttcggcagctgcggcagccgcagcagcggctgcagctgcagccatgttaaaccctgggcaacaacagccatatttcccatcaccggcaccggggcaggctcctggaccagctgcagcagccccagctcaggtacaggctgccgcagctgctacagttaaggcgcaccatcatcagcactcgcatcatccacagcagcagctggatattgagccggatagacctattggatatggagcctttggtgttgtctggtcagtaacagatccaagagatggaaagagagtagcgctcaaaaagatgcccaacgtcttccagaatctggtctcttgcaaaagggtcttccgggaattgaagatgttgtgtttttttaagcatgataatgtactctctgcccttgacatactccaacctccacacattgactattttgaagaaatatatgttgtcacagaattgatgcagagtgacctacataaaattatcgtctctcctcaaccactcagctcagatcatgtcaaagtttttctttatcagattttgcgaggtttgaaatatctccattcagctggcattttacatcgagacattaagccagggaatctccttgtgaacagcaactgtgttctaaagatttgtgattttggattggccagagtggaagaattagatgaatcccgtcatatgactcaggaagttgttactcagtattatcgggctccagaaatcctgatgggcagccgtcattacagcaatgctattgacatctggtctgtgggatgtatctttgcagaactactaggacgaagaatattgtttcaggcacagagtcccattcagcagttggatttgatcacggatctgttgggcacaccatcactggaagcaatgaggacagcttgtgaaggcgctaaggcacatatactcaggggtcctcataaacagccatctcttcctgtactctataccctgtctagccaggctacacatgaagctgttcatctcctttgcaggatgttggtctttgatccatccaaaagaatatccgctaaggatgccttagcccacccctacctagatgaagggcgactacgatatcacacatgtatgtgtaaatgttgcttttccacctccactggaagagtttataccagtgactttgagcctgtcaccaatcccaaatttgatgacactttcgagaagaacctcagttctgtccgacaggttaaagaaattattcatcagttcattttggaacagcagaaaggaaacagagtgcctctctgcatcaaccctcagtctgctgcttttaagagctttattagttccactgttgctcagccatctgagatgcccccatctcctctggtgtgggagtgatggtggaagataatgtactactgaagatgtaatgtagctttccactggagtctgggatttgcaattctggaggttaatcatgcttgtactgtaattttactaatgaagttttaaattaacaaccactacttgtatgatatgaataatatttagaaatgttactagacttttaatcttgtaaagtggttgtgcttttagaagaaaaatattttacccagagttgcacatgttttatgaatttagtgcagctgttatggctcacctcagaacaaaagagaattgaaccaaatttgggagtttggggttttatgttttgtttttcttttctaaaatgaagtgagattgttcacacacacacacacacacacacacacacacaaacacaaaggacagtcatacattttgatatttgagccattcctaaagatttggggttttctaaaactaaagaatctaggaaccttgcctgcgaccaatcatggagccacgtgagctgatcgtggctgcacctggggggagggtagggaggaggggcatgccacctaatgatcaagccctataattagcttctcattagagccgtgatggtgatgtgtgctgtctaaaatccaatgttgtgggtagagagaatgagtttgtgactaggagagactaaacttttgttttccttacccagtataaatatatatatatatatttaatctatttttattagaagtttttctgctctttcttacataaaagaaccccaagcatgcatctttcatgtgtgtaaataattcatttctgggctaatttcaaaagaatcccaatattgctgtatagaaagagaactagcttgcacattttaggtctgtgaaattttgtgagacttttcctgcactggacagtaaaaaaataataaaagacaaaaacaaatttaaaaaaaaatttaagccacaaaaaaaggcacatagggaattatgtcaaatgtgtttgtgtccttaggcaaagctgtgggagtcttgaaatgtcacagtagtaaataacttattactttttgacaagttctttttttctgttggaacactgaattcttctgtgcatatgtacatatgaatacaaatcgaaggcctctacctcctggagttatacaacttggcttgtttacctccacatgctgatgatgactattttttttttttgagttcagtgtggagacttgaaacttgaatgtcccttccaacttttatattaaaaataaaaagacaagaaaattgaagatcatttttcacctgtacaaggaatactaatggatcgtcttaaaattggtctaggaaaaaaccttggtgtgtgttatggacaattaactgttaaagttattgtaagttatctgtatttagcagagtattttcaacttgagtgatctgagctgaatttgaagactattaataagttatgtttggaagttttaacttcaatgaagtaattatttgctgtgaaagaaacaaacattgaattactaaacaaagatggtgcaatatctttgttttttttttatgaggctcctgagaatcaacccaactgaagcatttcaattcacttgaatgagaaacgtgtttagtatcaaaagagcccaagaagacactggtgtgaaaggtacaatctcagaggttggtcaattaccgtggcacactttctggtcactttgtacaatgtagatttgaagtacagtggtgaaaacattaaatgtgacatttgaaaaaaaaaaaaaaaaaaa

SEQ ID NO: 208 - DNA, 6659 bp, Homo sapiens
cgcgcgggcgcgggggacggcgcaggggccgcctggctggagcagccagaggggatagcttcgtcgagaacggaggacaccggcggtccagggtcctgggcagtcgcgccagagctgagcggagggcgcggcgcgagaacgaatctttgtgacattctctctcagcattctttatcccctgtttgctgaagacttcgacaaaagctggtcttagctgttggcattctcctgagaaaaggatagcttcagaaatcagaaaaacatttgggaggtgtctagcccagtggaccttctgaagagcaatgctaagaagacgtttggtttaaagaattaaaaggaagaacaacttaagagcttcttcaaagtttcccgcatgaaaattacttaaacgttgcacacaacgtttcacaaaatcttttgtgaaagaagaaaaggaaattcagtgtgtgagtctcagcaggagttaagctaatgcagcttaaaataatgccgaaaaagaagcgcttatctgcgggcagagtgcccctgattctcttcctgtgccagatgattagtgcactggaagtacctcttgatccaaaacttcttgaagacttggtacagcctccaaccatcacccaacagtctccaaaagattacattattgaccctcgggagaatattgtaatccagtgtgaagccaaagggaaaccgcccccaagcttttcctggacccgtaatgggactcattttgacatcgataaagaccctctggtcaccatgaagcctggcacaggaacgctcataattaacatcatgagcgaagggaaagctgagacctatgaaggagtctatcagtgtacagcaaggaacgaacgcggagctgcagtttctaataacattgttgtccgcccatccagatcaccattgtggaccaaagaaaaacttgaaccaatcacacttcaaagtggtcagtctttagtacttccctgcagacccccaattggattaccaccacctataatattttggatggataattcctttcaaagacttccacaaagtgagagagtttctcaaggtttgaatggggacctttatttttccaatgtcctcccagaggacacccgcgaagactatatctgttatgctagatttaatcatactcaaaccatacagcagaagcaacctatttctgtgaaggtgatttcagtggatgaattgaatgacactatagctgctaatttgagtgacactgagttttatggtgctaaatcaagtagagagaggccaccaacatttttaactccagaaggcaatgcaagtaacaaagaggaattaagaggaaatgtgctttcactggagtgcattgcagaaggactgcctaccccaattatttactgggcaaaggaagatggaatgctacccaaaaacaggacagtttataagaactttgagaaaaccttgcagatcattcatgtttcagaagcagactctggaaattaccaatgtatagcaaaaaacgcattaggagccatccaccataccatttctgttagagttaaagcggctccatactggatcacagcccctcaaaatcttgtgctgtccccaggagaggatgggaccttgatctgcagagctaatggcaaccccaaacccagaattagctggttaacaaatggagtcccaatagaaattgcccctgatgaccccagcagaaaaatagatggcgataccattattttttcaaatgttcaagaaagatcaagtgcagtctatcagtgcaatgcctctaatgaatatggatatttactggcaaacgcatttgtaaatgtgctggctgagccaccacgaatcctcacacctgcaaacacactctaccaggtcattgcaaacaggcctgctttactagactgtgccttctttgggtctcctctcccaaccatcgagtggtttaaaggagctaaaggaagtgctcttcatgaagatatttatgttttacatgaaaatggaactttggaaattcctgtggcccaaaaggacagtacaggaacttatacgtgtgttgcaaggaataaattagggatggcgaagaatgaagttcacttagaaatcaaagatcctacatggatcgttaaacagcccgaatatgcagttgtgcaaagagggagcatggtgtcctttgaatgcaaagtgaaacatgatcacaccttatccctcactgtcctgtggctgaaggacaacagggaactgcccagtgatgaaaggttcactgttgacaaggatcatctagtggtagctgatgtcagtgacgatgacagcgggacctacacgtgtgtggccaacaccactctggacagcgtctccgccagcgctgtgcttagcgttgttgctcctactccaactccagctcccgtttacgatgtcccaaatcctccctttgacttagaactgacagatcaacttgacaaaagtgttcagctgtcatggaccccaggcgatgacaacaatagccccattacaaaattcatcatcgaatatgaagatgcaatgcacaagccagggctgtggcaccaccaaactgaagtttctggaacacagaccacagcccagctgaagctgtctccttacgtgaactactccttccgcgtgatggcagtgaacagcattgggaagagcttgcccagcgaggcgtctgagcagtatttgacgaaagcctcagaaccagataaaaaccccacagctgtggaaggactgggatcagagcctgataatttggtgattacgtggaagcccttgaatggtttcgaatctaatgggccaggccttcagtacaaagttagctggcgccagaaagatggtgatgatgaatggacatctgtggttgtggcaaatgtatccaaatatattgtctcaggcacgccaacctttgttccatacctgatcaaagttcaggccctgaatgacatggggtttgcccccgagccagctgtagtcatgggacattctggagaagacctcccaatggtggctcctgggaacgtgcgtgtgaatgtggtgaacagtaccttagccgaggtgcactgggacccagtacctctgaaaagcatccgaggacacctacaaggctatcggatttactattggaagacccagagttcatctaaaagaaacagacgtcacattgagaaaaagatcctcaccttccaaggcagcaagactcatggcatgttgccggggctagagccctttagccactacacactgaatgtccgagtggtcaatgggaaaggggagggcccagccagccctgacagagtctttaatactccagaaggagtccccagtgctccctcgtctttgaagattgtgaatccaacactggactctctcactttggaatgggatccaccgagccacccgaatggcattttgacagagtacaccttaaagtatcagccaattaacagcacacatgaattaggccctctggtagatttgaaaattcctgccaacaagacacggtggactttaaaaaatttaaatttcagcactcgatataagttttatttctatgcacaaacatcagcaggatcaggaagtcaaattacagaggaagcagtaacaactgtggatgaagctggtattcttccacctgatgtaggtgcaggcaaagttcaagcagtaaatcccaggatcagcaatcttactgctgcagctgctgagacctatgccaatatcagttgggaatatgagggaccagagcatgtgaacttttatgttgaatatggtgtagcaggcagcaaagaagaatggagaaaagaaattgtaaatggttctcggagcttctttgggttaaagggtctaatgccaggaacagcatacaaagttcgagttggtgctgtgggggactctggttttgtgagttcagaggatgtgtttgagacaggcccagcgatggcaagccggcaggtggatattgcaactcagggctggttcattggtctgatgtgtgctgttgctctccttatcttaattttgctgattgtttgcttcatcagaagaaacaagggtggtaaatatccagttaaagaaaaggaagatgcccatgctgaccctgaaatccagcctatgaaggaagatgatgggacatttggagaatacagtgatgcagaagaccacaagcctttgaaaaaaggaagtcgaactccttcagacaggactgtgaaaaaagaagatagtgacgacagcctagttgactatggagaaggggttaatggccagttcaatgaggatggctcctttattggacaatacagtggtaagaaagagaaagagccggctgaaggaaacgaaagctcagaggcaccttctcctgtcaacgccatgaattcctttgtttaatttttaagctctttgccaatattccatttctctagaatgtttatcctaagcacttgtttgtcagccctctcatactatgaacatatgggtagagagtatattttctgctgtatgttagtattatgagaatagttacagcaaaaacataactcagtcaaatgatatgttaatatgaactggaatgcaaagtgcatactttttcattcaaaatgggtattcttgatttcctcagaactgataaaaaataatgcaacatcaccaacagatcctgttatttcctctgcaggatacagttcaatatgatgcatgaaaaatgctccacatttaaaggacatacccgtgtatgttatgaaaacatggtttgatactttgtttatactaccctcagctgaacccctatatatgaattccgttttcattgtcaagaatgttactgtagtattctctagaacttcaatgtctttgtggacattgttgtgaaattggtgactatgtatagctgtcgttagtctttttgggagactgttaggaacagtttgtacagtatatacttgctaaatgagttcattatgacagtcacattgctgatgcttactgagaactattacctactcttggctcctgttactccgtaggcttcttaatcttccaggcattacagcagcacagtgttctactttttacatcatttctatgttcggttgtttttaggcataaacaatgtgtattgcagtgcatttcggcatttgtgccatactgaaagaatcaaaaacaaatcatccaaattaaatttcaaacattatttcagagaacacagggcaagacacatacagtgccttcagatattaagcattccacaacatcgtgcattctgtatcagctggtccagtccattctgggtcctagattactgtcattgtctaaaagtaacttttaaaaagcagagttcatgaaaactgcaatgctgggaaaagaaggaaacatgaaaataaaaataagacagtttattagaaatagcatttcctcataagcataaaaagaaaatctttgttgccaactgaagcacatgatgattttgtggtcctttatggtttctattacattcagtaagaaagatgtcaacatgctagaaaattaattttaaaactaagttattccaacactaaaagcatacaacagcatgccaacagtaatatattattctccaagactttacctatgtaagtgttcaaaactctgcagcattaaacaacgtgtatgcaaattgttatggatacatttcagaatctaagaaatcaggcaagtgcttaaaaggccaacggtccaagggattacatctgcagtttaaaaagtaaatatatattctatcgtattcataaacaatatctatcaaatgggttacctccaaatatgaaaatctataacaacctatggttgaaggaatgctcagtttcatttgccaataaattggtttctcataacttgcatcaagtttaattttaagtaaagctttttatatgtagatattttgttgaatttgtaaatacacttaaaatgtagatgctatatgcttataggtgttacatacaaataaacatgcaatgtttatgttgtactgtataagaggtaagctaattaatgcagtgaatgggattggaaagcatctacttaaatatctattgggttcccccctccccccaccttttttgctgtgaaactgaaatagtgaacttttctacgtattgacagcagatttttcgatgaaatcttcagagctttgcctatggggcacagtaggcctagtaacctggcatgtttgatatatgtaggtaaagcataatttaaagtaatcccaggtaaagatggccctaaatactttcatgtctctatattcatttttcacagatccacctgtctcttgaaaatataaaaagacaaaacaggtttgccttggcatcagagagcacaaagattaaaagttactttaaatttgccaatattttgggagaacaataaaactacattttttcctcttccatactggtagatgcgaaatttatctgtgcatgaaagggtcacttctgtaatagtgcaacagatttggtattaaaaattaaatgtggttttaaaagttcctctctcttttgtaatttatgttcccaattgagtgtgaatgtccaagtaatggtgtatgtaatggtacaggcaaatgtgactggatttccctcaaaaaagtaactattaaacagtcttgatctctttgtgacttttaa

SEQ ID NO: 209 - DNA, 3264 bp, Homo sapiens
agccccgcgctttcgtgagccccctcgaggaacctggtctccgcatccagttaccacctcctgcctcagaggccatctgagcccttcgcacctcgcccctcagtccccccttccccccccgcccgcgtcgcctcgctccctcccgcccccccatcatcccttccctcgcagttcccctgtcctgaggggagccccgccacgggcagcgcggcggcggcggcaggagggagaaagtgaagcggtagctcgcgcacactcgcgccctcactcccggctaggcggcacccaccgccgggaggaggaggaggagccgagaggagctgagcgagcgcggaagtagctgctgctggtggtgacaatgtcaaataacggcctagacattcaagacaaacccccagcccctccgatgagaaataccagcactatgattggagccggcagcaaagatgctggaaccctaaaccatggttctaaacctctgcctccaaacccagaggagaagaaaaagaaggaccgattttaccgatccattttacctggagataaaacaaataaaaagaaagagaaagagcggccagagatttctctcccttcagattttgaacacacaattcatgtcggttttgatgctgtcacaggggagtttacgggaatgccagagcagtgggcccgcttgcttcagacatcaaatatcactaagtcggagcagaagaaaaacccgcaggctgttctggatgtgttggagttttacaactcgaagaagacatccaacagccagaaatacatgagctttacagataagtcagctgaggattacaattcttctaatgccttgaatgtgaaggctgtgtctgagactcctgcagtgccaccagtttcagaagatgaggatgatgatgatgatgatgctaccccaccaccagtgattgctccacgcccagagcacacaaaatctgtatacacacggtctgtgattgaaccacttcctgtcactccaactcgggacgtggctacatctcccatttcacctactgaaaataacaccactccaccagatgctttgacccggaatactgagaagcagaagaagaagcctaaaatgtctgatgaggagatcttggagaaattacgaagcatagtgagtgtgggcgatcctaagaagaaatatacacggtttgagaagattggacaaggtgcttcaggcaccgtgtacacagcaatggatgtggccacaggacaggaggtggccattaagcagatgaatcttcagcagcagcccaagaaagagctgattattaatgagatcctggtcatgagggaaaacaagaacccaaacattgtgaattacttggacagttacctcgtgggagatgagctgtgggttgttatggaatacttggctggaggctccttgacagatgtggtgacagaaacttgcatggatgaaggccaaattgcagctgtgtgccgtgagtgtctgcaggctctggagttcttgcattcgaaccaggtcattcacagagacatcaagagtgacaatattctgttgggaatggatggctctgtcaagctaactgactttggattctgtgcacagataaccccagagcagagcaaacggagcaccatggtaggaaccccatactggatggcaccagaggttgtgacacgaaaggcctatgggcccaaggttgacatctggtccctgggcatcatggccatcgaaatgattgaaggggagcctccatacctcaatgaaaaccctctgagagccttgtacctcattgccaccaatgggaccccagaacttcagaacccagagaagctgtcagctatcttccgggactttctgaaccgctgtctcgagatggatgtggagaagagaggttcagctaaagagctgctacagcatcaattcctgaagattgccaagcccctctccagcctcactccactgattgctgcagctaaggaggcaacaaagaacaatcactaaaaccacactcaccccagcctcattgtgccaagccttctgtgagataaatgcacatttcagaaattccaactcctgatgccctcttctccttgccttgcttctcccatttcctgatctagcactcctcaagactttgatccttggaaaccgtgtgtccagcattgaagagaactgcaactgaatgactaatcagatgatggccatttctaaataaggaatttcctcccaattcatggatatgagggtggtttatgattaagggtttatataaataaatgtttctagtcttccgtgtgtcaaaatcctcacctccttcataaccatctcccacaattaattcttgactatataaatttatggtttgataatattatcaatttgtaatcaattgagatttctttagtgcttgcttttctgtgactcaactgcccagacacctcattgtacttgaaaactggaacagcttgggaatgccatggggtttgataatctgccagggacatgaagaggctcagcttcctggaccatgactttggctcagctgatcctgacatgggagaacaaccacatttttctttgtgtgtgcttctagcagctgttcgggaggaccttgacccaatagtgttcccatgctgtttcttgtgaaatgctctcggctatgtagcagcttttgattccctgcataccctaggctgctgcccctatcctgtcccttgtttataacattgagaggttttctagggcacatactgagtgagagcagtgttgagaagtcggggaaaatggtgactacttttagagcaaggctgggcatcagcacctgtccagctctacttgtgtgatgtttcaggaactcagcccctttttctgcctaggataaggagctgaaagattaacttggatcttctaatggtccaaatcttttggtcacaataaagagtctccaaattagagactgcatgttagttctggatggatttggtggcctgacatgataccctgccagctgtgaggggaccccgtttttaagatgcatggccaagctctctgcaaatggaaatgcttacactgggtgttggggatgtttgctacctcctgctatttttgtggttttggttctcccactatggtaggacccctggccagcattgtggcttgtcatgtcagccccattgactaccttctcatgctctgaggtactactgcctctgcagcacaaatttctatttctgtcaataaaaggagatgaaaatattctaaaaaaaaaa

SEQ ID NO: 210 - DNA, 3724 bp, Homo sapiens
tctccctcggcgccgccgccgccgcccgcggggctgggacccgatgcggttagagccgcggagcctggaagagccccgagcgtttctgctttgggacaaccatacatctaattccttaaagtagttttatatgtaaaacttgcaaagaatcagaacaatgcctccacgaccatcatcaggtgaactgtggggcatccacttgatgcccccaagaatcctagtagaatgtttactaccaaatggaatgatagtgactttagaatgcctccgtgaggctacattaataaccataaagcatgaactatttaaagaagcaagaaaataccccctccatcaacttcttcaagatgaatcttcttacattttcgtaagtgttactcaagaagcagaaagggaagaattttttgatgaaacaagacgactttgtgaccttcggctttttcaaccctttttaaaagtaattgaaccagtaggcaaccgtgaagaaaagatcctcaatcgagaaattggttttgctatcggcatgccagtgtgtgaatttgatatggttaaagatccagaagtacaggacttccgaagaaatattctgaacgtttgtaaagaagctgtggatcttagggacctcaattcacctcatagtagagcaatgtatgtctatcctccaaatgtagaatcttcaccagaattgccaaagcacatatataataaattagataaagggcaaataatagtggtgatctgggtaatagtttctccaaataatgacaagcagaagtatactctgaaaatcaaccatgactgtgtaccagaacaagtaattgctgaagcaatcaggaaaaaaactcgaagtatgttgctatcctctgaacaactaaaactctgtgttttagaatatcagggcaagtatattttaaaagtgtgtggatgtgatgaatacttcctagaaaaatatcctctgagtcagtataagtatataagaagctgtataatgcttgggaggatgcccaatttgatgttgatggctaaagaaagcctttattctcaactgccaatggactgttttacaatgccatcttattccagacgcatttccacagctacaccatatatgaatggagaaacatctacaaaatccctttgggttataaatagtgcactcagaataaaaattctttgtgcaacctacgtgaatgtaaatattcgagacattgataagatctatgttcgaacaggtatctaccatggaggagaacccttatgtgacaatgtgaacactcaaagagtaccttgttccaatcccaggtggaatgaatggctgaattatgatatatacattcctgatcttcctcgtgctgctcgactttgcctttccatttgctctgttaaaggccgaaagggtgctaaagaggaacactgtccattggcatggggaaatataaacttgtttgattacacagacactctagtatctggaaaaatggctttgaatctttggccagtacctcatggattagaagatttgctgaaccctattggtgttactggatcaaatccaaataaagaaactccatgcttagagttggagtttgactggttcagcagtgtggtaaagttcccagatatgtcagtgattgaagagcatgccaattggtctgtatcccgagaagcaggatttagctattcccacgcaggactgagtaacagactagctagagacaatgaattaagggaaaatgacaaagaacagctcaaagcaatttctacacgagatcctctctctgaaatcactgagcaggagaaagattttctatggagtcacagacactattgtgtaactatccccgaaattctacccaaattgcttctgtctgttaaatggaattctagagatgaagtagcccagatgtattgcttggtaaaagattggcctccaatcaaacctgaacaggctatggaacttctggactgtaattacccagatcctatggttcgaggttttgctgttcggtgcttggaaaaatatttaacagatgacaaactttctcagtatttaattcagctagtacaggtcctaaaatatgaacaatatttggataacttgcttgtgagatttttactgaagaaagcattgactaatcaaaggattgggcactttttcttttggcatttaaaatctgagatgcacaataaaacagttagccagaggtttggcctgcttttggagtcctattgtcgtgcatgtgggatgtatttgaagcacctgaataggcaagtcgaggcaatggaaaagctcattaacttaactgacattctcaaacaggagaagaaggatgaaacacaaaaggtacagatgaagtttttagttgagcaaatgaggcgaccagatttcatggatgctctacagggctttctgtctcctctaaaccctgctcatcaactaggaaacctcaggcttgaagagtgtcgaattatgtcctctgcaaaaaggccactgtggttgaattgggagaacccagacatcatgtcagagttactgtttcagaacaatgagatcatctttaaaaatggggatgatttacggcaagatatgctaacacttcaaattattcgtattatggaaaatatctggcaaaatcaaggtcttgatcttcgaatgttaccttatggttgtctgtcaatcggtgactgtgtgggacttattgaggtggtgcgaaattctcacactattatgcaaattcagtgcaaaggcggcttgaaaggtgcactgcagttcaacagccacacactacatcagtggctcaaagacaagaacaaaggagaaatatatgatgcagccattgacctgtttacacgttcatgtgctggatactgtgtagctaccttcattttgggaattggagatcgtcacaatagtaacatcatggtgaaagacgatggacaactgtttcatatagattttggacactttttggatcacaagaagaaaaaatttggttataaacgagaacgtgtgccatttgttttgacacaggatttcttaatagtgattagtaaaggagcccaagaatgcacaaagacaagagaatttgagaggtttcaggagatgtgttacaaggcttatctagctattcgacagcatgccaatctcttcataaatcttttctcaatgatgcttggctctggaatgccagaactacaatcttttgatgacattgcatacattcgaaagaccctagccttagataaaactgagcaagaggctttggagtatttcatgaaacaaatgaatgatgcacatcatggtggctggacaacaaaaatggattggatcttccacacaattaaacagcatgcattgaactgaaaagataactgagaaaatgaaagctcactctggattccacactgcactgttaataactctcagcaggcaaagaccgattgcataggaattgcacaatccatgaacagcattagaatttacagcaagaacagaaataaaatactatataatttaaataatgtaaacgcaaacagggtttgatagcacttaaactagttcatttcaaaattaagctttagaataatgcgcaatttcatgttatgccttaagtccaaaaaggtaaactttgaagattgtttgtatctttttttaaaaaacaaaacaaaacaaaaatccccaaaatatatagaaatgatggagaaggaaaaaaaaaaaaaaaaa

SEQ ID NO: 211 - DNA, 3213 bp, Homo sapiens
atgtgcttcagtttcataatgcctcctgctatggcagacatccttgacatctgggcggtggattcacagatagcatctgatggctccatacctgtggatttccttttgcccactgggatttatatccagttggaggtacctcgggaagctaccatttcttatattaagcagatgttatggaagcaagttcacaattacccaatgttcaacctccttatggatattgactcctatatgtttgcatgtgtgaatcagactgctgtatatgaggagcttgaagatgaaacacgaagactctgtgatgtcagaccttttcttccagttctcaaattagtgacaagaagttgtgacccaggggaaaaattagactcaaaaattggagtccttataggaaaaggtctgcatgaatttgattccttgaaggatcctgaagtaaatgaatttcgaagaaaaatgcgcaaattcagcgaggaaaaaatcctgtcacttgtgggattgtcttggatggactggctaaaacaaacatatccaccagagcatgaaccatccatccctgaaaacttagaagataaactttatgggggaaagctcatcgtagctgttcattttgaaaactgccaggacgtgtttagctttcaagtgtctcctaatatgaatcctatcaaagtaaatgaattggcaatccaaaaacgtttgactattcatgggaaggaagatgaagttagcccctatgattatgtgttgcaagtcagcgggagagtagaatatgtttttggtgatcatccactaattcagttccagtatatccggaactgtgtgatgaacagagccctgccccattttatacttgtggaatgctgcaagatcaagaaaatgtatgaacaagaaatgattgccatagaggctgccataaatcgaaattcatctaatcttcctcttccattaccaccaaagaaaacacgaattatttctcatgtttgggaaaataacaaccctttccaaattgtcttggttaagggaaataaacttaacacagaggaaactgtaaaagttcatgtcagggctggtctttttcatggtactgagctcctgtgtaaaaccatcgtaagctcagaggtatcagggaaaaatgatcatatttggaatgaaccactggaatttgatattaatatttgtgacttaccaagaatggctcgattatgttttgctgtttatgcagttttggataaagtaaaaacgaagaaatcaacgaaaactattaatccctctaaatatcagaccatcaggaaagctggaaaagtgcattatcctgtagcgtgggtaaatacgatggtttttgactttaaaggacaattgagaactggagacataatattacacagctggtcttcatttcctgatgaactcgaagaaatgttgaatccaatgggaactgttcaaacaaatccatatactgaaaatgcaacagctttgcatgttaaatttccagagaataaaaaacaaccttattattaccctcccttcgataagattattgaaaaggcagctgagattgcaagcagtgatagtgctaatgtgtcaagtcgaggtggaaaaaagtttcttcctgtattgaaagaaatcttggacagggatcccttgtctcaactgtgtgaaaatgaaatggatcttatttggactttgcgacaagactgccgagagattttcccacaatcactgccaaaattactgctgtcaatcaagtggaataaacttgaggatgttgctcagcttcaggcgctgcttcagatttggcctaaactgcccccccgggaggccctagagcttctggatttcaactatccagaccagtacgttcgagaatatgctgtaggctgcctgcgacagatgagtgatgaagaactttctcaatatcttttacaactggtgcaagtgttaaaatatgagccttttcttgattgtgccctctctagattcctattagaaagagcacttggtaatcggaggatagggcagtttctattttggcatcttaggtcagaagtgcacattcctgctgtctcagtacaatttggtgtcatccttgaagcatactgccggggaagtgtggggcacatgaaagtgctttctaagcaggttgaagcactcaataagttaaaaactttaaatagtttaatcaaactgaatgccgtgaagttaaacagagccaaagggaaggaggccatgcatacctgtttaaaacagagtgcttaccgggaagccctctctgacctgcagtcacccctgaacccatgtgttatcctctcagaactctatgttgaaaagtgcaaatacatggattccaaaatgaagcctttgtggctggtatacaataacaaggtatttggtgaggattcagttggagtgatttttaaaaatggtgatgatttacgacaggatatgttgacactccaaatgttgcgcttgatggatttactctggaaagaagctggtttggatcttcggatgttgccttatggctgtttagcaacaggagatcgctctggcctcattgaagttgtgagcacctctgaaacaattgctgacattcagctgaacagtagcaatgtggctgctgcagcagccttcaacaaagatgcccttctgaactggcttaaagaatacaactctggggatgacctggaccgagccattgaggaatttacactgtcctgtgctggctactgtgtagcttcttatgtccttgggattggtgacagacatagtgacaacatcatggtcaaaaaaactggccagctcttccacattgactttggacatattcttggaaatttcaaatctaagtttggcattaaaagggagcgagtgccttttattcttacctatgatttcatccatgtcattcaacaaggaaaaacaggaaatacagaaaagtttggccggttccgccagtgttgtgaggatgcatatctgattttacgacggcatgggaatctcttcatcactctctttgcgctgatgttgactgcagggcttcctgaactcacatcagtcaaagatatacagtatcttaaggactctcttgcattagggaagagtgaagaagaagcactcaaacagtttaagcaaaaatttgatgaggcgctcagggaaagctggactactaaagtgaactggatggcccacacagttcggaaagactacagatcttaa

SEQ ID NO: 212 - DNA, 5220 bp, Homo sapiens
cagtcgctccgagcggccgcgagcagagccgcccagccctgtcagctgcgccgggacgataaggagtcaggccagggcgggatgacactcattgattctaaagcatctttaatctgccaggcggagggggctttgctggtctttcttggactattccagagaggacaactgtcatctgggaagtaacaacgcaggatgccccctggggtggactgccccatggaattctggaccaaggaggagaatcagagcgttgtggttgacttcctgctgcccacaggggtctacctgaacttccctgtgtcccgcaatgccaacctcagcaccatcaagcagctgctgtggcaccgcgcccagtatgagccgctcttccacatgctcagtggccccgaggcctatgtgttcacctgcatcaaccagacagcggagcagcaagagctggaggacgagcaacggcgtctgtgtgacgtgcagcccttcctgcccgtcctgcgcctggtggcccgtgagggcgaccgcgtgaagaagctcatcaactcacagatcagcctcctcatcggcaaaggcctccacgagtttgactccttgtgcgacccagaagtgaacgactttcgcgccaagatgtgccaattctgcgaggaggcggccgcccgccggcagcagctgggctgggaggcctggctgcagtacagtttccccctgcagctggagccctcggctcaaacctgggggcctggtaccctgcggctcccgaaccgggcccttctggtcaacgttaagtttgagggcagcgaggagagcttcaccttccaggtgtccaccaaggacgtgccgctggcgctgatggcctgtgccctgcggaagaaggccacagtgttccggcagccgctggtggagcagccggaagactacacgctgcaggtgaacggcaggcatgagtacctgtatggcaactacccgctctgccagttccagtacatctgcagctgcctgcacagtgggttgacccctcacctgaccatggtccattcctcctccatcctcgccatgcgggatgagcagagcaaccctgccccccaggtccagaaaccgcgtgccaaaccacctcccattcctgcgaagaagccttcctctgtgtccctgtggtccctggagcagccgttccgcatcgagctcatccagggcagcaaagtgaacgccgacgagcggatgaagctggtggtgcaggccgggcttttccacggcaacgagatgctgtgcaagacggtgtccagctcggaggtgagcgtgtgctcggagcccgtgtggaagcagcggctggagttcgacatcaacatctgcgacctgccccgcatggcccgtctctgctttgcgctgtacgccgtgatcgagaaagccaagaaggctcgctccaccaagaagaagtccaagaaggcggactgccccattgcctgggccaacctcatgctgtttgactacaaggaccagcttaagaccggggaacgctgcctctacatgtggccctccgtcccagatgagaagggcgagctgctgaaccccacgggcactgtgcgcagtaaccccaacacggatagcgccgctgccctgctcatctgcctgcccgaggtggccccgcaccccgtgtactaccccgccctggagaagatcttggagctggggcgacacagcgagtgtgtgcatgtcaccgaggaggagcagctgcagctgcgggaaatcctggagcggcgggggtctggggagctgtatgagcacgagaaggacctggtgtggaagctgcggcatgaagtccaggagcacttcccggaggcgctagcccggctgctgctggtcaccaagtggaacaagcatgaggatgtggcccagatgctctacctgctgtgctcctggccggagctgcccgtcctgagcgccctggagctgctagacttcagcttccccgattgccacgtaggctccttcgccatcaagtcgctgcggaaactgacggacgatgagctgttccagtacctgctgcagctggtgcaggtgctcaagtacgagtcctacctggactgcgagctgaccaaattcctgctggaccgggccctggccaaccgcaagatcggccacttccttttctggcacctccgctccgagatgcacgtgccgtcggtggccctgcgcttcggcctcatcctggaggcctactgcaggggcagcacccaccacatgaaggtgctgatgaagcagggggaagcactgagcaaactgaaggccctgaatgacttcgtcaagctgagctctcagaagacccccaagccccagaccaaggagctgatgcacttgtgcatgcggcaggaggcctacctagaggccctctcccacctgcagtccccactcgaccccagcaccctgctggctgaagtctgcgtggagcagtgcaccttcatggactccaagatgaagcccctgtggatcatgtacagcaacgaggaggcaggcagcggcggcagcgtgggcatcatctttaagaacggggatgacctccggcaggacatgctgaccctgcagatgatccagctcatggacgtcctgtggaagcaggaggggctggacctgaggatgaccccctatggctgcctccccaccggggaccgcacaggcctcattgaggtggtactccgttcagacaccatcgccaacatccaactcaacaagagcaacatggcagccacagccgccttcaacaaggatgccctgctcaactggctgaagtccaagaacccgggggaggccctggatcgagccattgaggagttcaccctctcctgtgctggctattgtgtggccacatatgtgctgggcattggcgatcggcacagcgacaacatcatgatccgagagagtgggcagctgttccacattgattttggccactttctggggaatttcaagaccaagtttggaatcaaccgcgagcgtgtcccattcatcctcacctatgactttgtccatgtgattcagcaggggaagactaataatagtgagaaatttgaacggttccggggctactgtgaaagggcctacaccatcctgcggcgccacgggcttctcttcctccacctctttgccctgatgcgggcggcaggcctgcctgagctcagctgctccaaagacatccagtatctcaaggactccctggcactggggaaaacagaggaggaggcactgaagcacttccgagtgaagtttaacgaagccctccgtgagagctggaaaaccaaagtgaactggctggcccacaacgtgtccaaagacaacaggcagtagtggctcctcccagccctgggcccaagaggaggcggctgcgggtcgtggggaccaagcacattggtcctaaaggggctgaagagcctgaactgcacctaacgggaaagaaccgacatggctgccttttgtttacactggttatttatttatgacttgaaatagtttaaggagctaaacagccataaacggaaacgcctccttcattcagcggcggtgctgggccccccgaggctgcacctggctctcggctgaggattgtcaccccaagtcttccagctggtggatctgggcccagcaaagactgttctcctcccgagggaaccttcttcccaggcctcccgccagactgcctgggtcctggcgcctggcggtcacctggtgcctactgtccgacaggatgcctcgatcctcgtgcgacccaccctgtgtatcctccctagactgagttctggcagctccccgaggcagccggggtaccctctagattcagggatgcttgctctccacttttcaagtgggtcttgggtacgagaattccctcatctttctctactgtaaagtgattttgtttgcaggtaagaaaataatagatgactcaccacacctctacggctggggagatcaggcccagccccataaaggagaatctacgctggtcctcaggacgtgttaaagagatctgggcctcatgtagctcaccccggtcacgcatgaaggcaaaagcaggtcagaagcgaatactctgccattatctcaaaaatctttttttttttttttttgagatggggtcttcctctgttgcccaggctggagtgcagtggtgcaatcttggctcactgtaacctccgcctcccaggttcaagtgattcttcttgcctcagcctcctgagtagctgggattacaggtgtgcaccacccgtacccagctaatttttgtattttagtagagacgggggtttcaccatgttggctgggctggtctcgaactcctgacctcaggtgatccacccgcctgagcctcccaaagtgctgggattacaggcatgagccaccacgcccggcccactctgccattgtctaagccacctctgaaagcaggttttaacaaaaggatgaggccagaactcttccagaaccatcacctttgggaacctgctgtgagagtgctgaggtaccagaagtgtgagaacgagggggcgtgctgggatctttctctctgactatacttagtttgaaatggtgcaggcttagtcttaagcctccaaaggcctggatttgagcagctttagaaatgcaggttctagggcttctcccagccttcagaagccaactaactctgcagatggggctaggactgtgggcttttagcagcccacaggtgatcctaacatatcaggccatggactcaggacctgcccggtgatgctgttgatttctcaaaggtcttccaaaactcaacagagccagaagtagccgcccgctcagcggctcaggtgccagctctgttctgattcaccaggggtccgtcagtagtcattgccacccgcggggcacctccctggccacacgcctgttcccagcaagtgctgaaactcactagaccgtctgcctgtttcgaaatggggaaagccgtgcgtgcgcgttatttatttaagtgcgcctgtgtgcgcgggtgtgggagcacactttgcaaagccacagcgtttctggttttgggtgtacagtcttgtgtgcctggcgagaagaatattttctatttttttaagtcatttcatgtttctgtctggggaaggcaagttagttaagtatcactgatgtgggttgagaccagcactctgtgaaaccttgaaatgagaagtaaaggcagatgaaaagaaaaaaaaaaaaaaa

SEQ ID NO: 213 - DNA, 6453 bp, Homo sapiens
tacaaccaggctcaactgttgcatggtagcagatttgcaaacatgagtgctgaggggtaccagtacagagcgctgtatgattataaaaaggaaagagaagaagatattgacttgcacttgggtgacatattgactgtgaataaagggtccttagtagctcttggattcagtgatggacaggaagccaggcctgaagaaattggctggttaaatggctataatgaaaccacaggggaaaggggggactttccgggaacttacgtagaatatattggaaggaaaaaaatctcgcctcccacaccaaagccccggccacctcggcctcttcctgttgcaccaggttcttcgaaaactgaagcagatgttgaacaacaagctttgactctcccggatcttgcagagcagtttgcccctcctgacattgccccgcctcttcttatcaagctcgtggaagccattgaaaagaaaggtctggaatgttcaactctatacagaacacagagctccagcaacctggcagaattacgacagcttcttgattgtgatacaccctccgtggacttggaaatgatcgatgtgcacgttttggctgacgctttcaaacgctatctcctggacttaccaaatcctgtcattccagcagccgtttacagtgaaatgatttctttagctccagaagtacaaagctccgaagaatatattcagctattgaagaagcttattaggtcgcctagcatacctcatcagtattggcttacgcttcagtatttgttaaaacatttcttcaagctctctcaaacctccagcaaaaatctgttgaatgcaagagtactctctgaaattttcagccctatgcttttcagattctcagcagccagctctgataatactgaaaacctcataaaagttatagaaattttaatctcaactgaatggaatgaacgacagcctgcaccagcactgcctcctaaaccaccaaaacctactactgtagccaacaacggtatgaataacaatatgtccttacaagatgctgaatggtactggggagatatctcgagggaagaagtgaatgaaaaacttcgagatacagcagacgggacctttttggtacgagatgcgtctactaaaatgcatggtgattatactcttacactaaggaaagggggaaataacaaattaatcaaaatatttcatcgagatgggaaatatggcttctctgacccattaaccttcagttctgtggttgaattaataaaccactaccggaatgaatctctagctcagtataatcccaaattggatgtgaaattactttatccagtatccaaataccaacaggatcaagttgtcaaagaagataatattgaagctgtagggaaaaaattacatgaatataacactcagtttcaagaaaaaagtcgagaatatgatagattatatgaagaatatacccgcacatcccaggaaatccaaatgaaaaggacagctattgaagcatttaatgaaaccataaaaatatttgaagaacagtgccagacccaagagcggtacagcaaagaatacatagaaaagtttaaacgtgaaggcaatgagaaagaaatacaaaggattatgcataattatgataagttgaagtctcgaatcagtgaaattattgacagtagaagaagattggaagaagacttgaagaagcaggcagctgagtatcgagaaattgacaaacgtatgaacagcattaaaccagaccttatccagctgagaaagacgagagaccaatacttgatgtggttgactcaaaaaggtgttcggcaaaagaagttgaacgagtggttgggcaatgaaaacactgaagaccaatattcactggtggaagatgatgaagatttgccccatcatgatgagaagacatggaatgttggaagcagcaaccgaaacaaagctgaaaacctgttgcgagggaagcgagatggcacttttcttgtccgggagagcagtaaacagggctgctatgcctgctctgtagtggtggacggcgaagtaaagcattgtgtcataaacaaaacagcaactggctatggctttgccgagccctataacttgtacagctctctgaaagaactggtgctacattaccaacacacctcccttgtgcagcacaacgactccctcaatgtcacactagcctacccagtatatgcacagcagaggcgatgaagcgcttactctttgatccttctcctgaagttcagccaccctgaggcctctggaaagcaaagggctcctctccagtctgatctgtgaattgagctgcagaaacgaagccatctttctttggatgggactagagctttctttcacaaaaaagaagtaggggaagacatgcagcctaaggctgtatgatgaccacacgttcctaagctggagtgcttatcccttctttttctttttttctttggtttaatttaaagccacaaccacatacaacacaaagagaaaaagaaatgcaaaaatctctgcgtgcagggacaaagaggcctttaaccatggtgcttgttaatgctttctgaagctttaccagctgaaagttgggactctggagagcggaggagagagaggcagaagaaccctggcctgagaaggtttggtccagcctggtttagcctggatgttgctgtgcacggtggacccagacacatcgcactgtggattatttcattttgtaacaaatgaacgatatgtagcagaaaggcacgtccactcacaagggacgctttgggagaatgtcagttcatgtatgttcagaagaaattctgtcatagaaagtgccagaaagtgtttaacttgtcaaaaaacaaaaacccagcaacagaaaaatggagtttggaaaacaggacttaaaatgacattcagtatataaaatatgtacataatattggatgactaactatcaaatagatggatttgtatcaataccaaatagcttctgttttgttttgctgaaggctaaattcacagcgctatgcaattcttaattttcattaagttgttatttcagttttaaatgtaccttcagaataagcttccccaccccagtttttgttgcttgaaaatattgttgtcccggatttttgttaatattcatttttgttatccttttttaaaagtaaatgtacaggatgccagtaaaaaaaaaaaatggcttcagaattaaaactatgaaatattttacagtttttcttgtacagagtacttggctgttagcccaaggttaaaaagttcataacagattttttttggactgttttgttgggcagtgcctgataagcttcaaagctgctttattcaataaaaaaaagaaatgaaaaagatatatgaatatgacaaagtattgctgagtccaacaatgttgttttaagactcttaaaatacggtacctggcaatgtttatttcataaagaattgtgaacttcttgaatctagggagggggaatgtagtgaagggatgtatcaagtggggtggtgggagggggaggcaaggttatatgcactttctcatgatttacagagaagtgaataactgcaaagtgaagttgcttcttctacttcagtcttctctcactttgatttgctagttgttatcaattaatgacaattacaaacctactgtatctctaatacagtgtgactggtcaggtatttcagttcttaggaaggaagtgccaagtttgtttttgggttcctggaacagcgctcacctttgtttagaacactggtttaaagggataatcatctctgtcacattagactatccatcatgaccagcaaatactcattttaggaaaaaaaaaagcatgatctgaaaaatacttttggtggtatgttggttaccctcctagctttccatttggtttagaacataaagcaaatagacacagtcatactgtcactgctctggactgtgtggagctcgctaaagtcatggtcattgcaggaatccaagtggcagtccttctcattcattctaatcattgtatgtgcttcactacgggggggagaaggaaacgttagcatcatgtttcccatttagggcaggagtgagaggtctctcttcctgatttagatatgcaaaagctggtatgttcagtaggaactgtacatgtgttgggaggcataaagactaattagcaaccataatatggtcactaccctaatagactaaatgaaatcttgcaatttcaaattactctttctccatattagatttacccacagctatatttctgtttaagtactagggtgagggttttctgttactttgttttttaatgttgttccttttgaaagaatcagtcttgcagctgagtgaaaaatctgtggaatgtattatttgtcctctttacatgaaactactcatacttaagcaaaagtcagtcttatagcaagactgttagccctcaaacttgactctactgatctgaccatttccctctcatcgccagacaactgacgatttccctggttttagtctgcgtctctgctttaaagttattgtgatatccttctagatcatacacaagtctaacagttaattagttaacagtttttaaactaggtttgtgggtatttttttggtagcacatgtatgctattacatacaaatttttatttctaaaatataagatctgagattgaatattttcattaaaagctacagttttgtgaatctttgtgcttcaacattctttgcaagatgatacggtatttaggcatttgccttatttttgcatctcacaaacataagtgcaatagatcttttcattgaacagcaaagtaggattcatcattccatatgacttgagttacaccagacctgttctgcccaatgcctttttgattacagtgtagcttgcccaccgcatttgtcgttttagatactttgctagccggccactttggatttcatcagacagtcctaacaatattgtctgaacggctgaatatgaatagatacagcagaggcactcctgatatatgatttttatccatgcgtcagtttttcccacccagtgtagcatcctaaagataaagccagaagctaagctgcagtgaggctgtgattgggcgtagaagtgggagcattgggacctcacattacacacacgagagatcataaccatgtgaaaaggcaaaaagcatgtgtttgcaacatctgataacttcatggcctttgataaatgtatatatgtatatgtgcatggactgtgtttccagtacacctttcagccaaaacagatccacagtagttgttgagttcaagtacataaagtacataacaagcgaacgtctagtacaattcttacttatgtgtatgggatttttccctttgaggttgctttgttttgtcttacaaaggtgaaaattgtttgtaagtgaagtgagaagttcatatttctttggcttttttgtgtttttaaaagttactccttttagggagctggtctgatgacttgcttagcttggaaatccttgttttcagtgtgtcgagtcaaaatgtgtttatgtgagctgtcactgtggggaaccaattgctttgtcatatagctggttatgaactagtaacatgtttgggaagtcctactgatgttcctttggaagaaaaaatctgctggttttaacaactgtgcttttgctatgtatggtatccaagttagttgaaacgcagacactgagatctgtttgagtttagggtcatttttagaaaggggcagtttaaagcacaatgtctcacatgggacaaagttccaaaatgccaaattcttattttttaaaaagctagttctataaaatactggtattatgggtggggaggaaatagaattgagtcaattggaaagactatccaacttaacatgaaacttgtcaccatgagatagcattagctgcccaggatgctgctatatatatatatatatatatatatgtgtgtgtgtgtgtgtgtgtgtgtgtatatatatatatatatatatatatatatatatatatatatgtgtgtgtatatatatatatatgtgtatatatatatgtatatacatatatgtatatatatgcacatatatatatgtatttaaaaaaatcaaaacaaaaaaaaactcatttatacctgtgtattttttaaagctacaatctgttcaatgtttttaaaaatctgtttatatgacattgttaaaataaagttggtcttttgacgagagggaggatgtcacggtcagttgtaactttgccttcacaaggcaactggggtggggggtgggggtagtgtgcctccttgacatttcgttcaagttatagattcaatggagctatgtcttgttttaagttgctttaatgcattgtattagatcttcaaacagaataaaggttgttttgaaactgaaaaaaaaaaaaaaaaaa

SEQ ID NO: 214 - DNA, 3953 bp, Homo sapiens
ggctgcggcgacggtggccgcggtggagccacggggcgggcttggcttggtgtgacggcggctgcggcggcggtggcggccgcgaccaggtcggcgtcctcagctggccgagcatggtggcagcctgcacccttggctcccttgtctggtgcagccagcagagccgccagccttgggcgcccatggccctccgtgtgagggcgtgagcggcctgccccagcctcacctgctgatggaggactcaatggcccagtgacctgacaccacaccaccaactccctcccaccagctgacgaatggtggacccagtgacgagtggcccttgtaagggtcatggaataatttgaagcgaggcatgagcggcccctgtggtcgcctgtgactgctggagatagaggtcccagcaccccaagccaacccagcggaccctcccagccctgcttcaaccaatggggccagtggggctccaagcagccacctaaccatccagaccccaccccactcacgcggccatggcgggccctgagggcttccagtaccgcgctctgtacccgttccgccgggagcggccggaggacctggagctgctgcccggcgacgtgctggtagtgagccgggcggccttgcaggcgctgggcgtggccgagggtggcgagcgctgcccacagagcgtgggctggatgcccggcctcaacgagcgcacacggcagcgaggtgacttccctggcacctatgtggagttcctggggcccgtggccctggcccggcccggccctcgcccacggggcccccgcccactgcccgccaggccccgtgatggggcccctgagccaggcctcacactccccgacttgcccgagcagttctccccacctgatgtggctccccctcttctggtgaagcttgtggaggccattgaaaggacagggctggacagcgaatctcactaccgcccggagctgcccgcaccgcgtacagactggtccctgagcgacgtggatcagtgggacacggcagccctggctgacggcattaagagcttcctgctggcactgcccgcgccgctcgtgacccccgaggcctcggccgaggcgcgccgggccctgcgggaggccgcggggcccgtggggccggcgctggagccaccgacgctgccgctgcaccgcgcgctcacgctgcgcttcctgctccagcacctgggccgcgtggcccgccgcgccccggccctgggtcccgcggtccgggccctgggcgccacctttgggccgctgctgctgcgcgcgccgccgccgccgtcctcgccgccgccagggggcgctcccgacgggagtgagcccagccctgacttcccggcgctgctggtggagaagctgcttcaggaacacttggaagagcaggaggttgcgcccccagcgctgccgcctaaaccccccaaggcaaagccggcccccacagtcctggccaatggagggagcccaccctccctgcaggatgctgagtggtactggggggacatttcaagggaggaggtgaacgagaaactccgggacactcccgatggcaccttcctagtccgagatgcttctagcaagatccagggcgagtacacgctgaccctcaggaaaggcgggaacaataagctgatcaaggtcttccaccgagatgggcactatggcttctcagagccactcaccttctgctccgttgtggacctcatcaatcactaccgccacgagtctctggcccagtacaatgccaagctggacacacggctcctctaccctgtgtccaaataccagcaggaccagattgtcaaggaggacagcgtggaggcagtgggcgcccagcttaaggtctatcaccagcagtaccaggacaagagccgcgagtatgaccagctttatgaagagtacacacggacctcccaggagctgcagatgaagcgtactgcaattgaggccttcaatgagactatcaagatctttgaagagcagggccagactcaagagaaatgcagcaaggaatacctggagcgcttccggcgtgagggcaacgagaaagagatgcaaaggatcctgctgaactccgagcggctcaagtcccgcattgccgagatccatgagagccgcacgaagctggagcagcagctgcgggcccaggcctcggacaacagagagatcgacaagcgcatgaacagcctcaagccggacctcatgcagctgcgcaagatccgagaccagtacctcgtgtggctcacccagaaaggcgcccggcagaagaaaatcaacgagtggctggggattaaaaatgagactgaggaccagtacgcactcatggaggacgaggacgatctcccgcaccacgaggaacgcacttggtacgtgggcaagatcaaccgcacgcaggcagaggagatgctgagtggcaagcgggatggcaccttcctcatccgcgagagcagccagcggggctgctacgcctgctccgtggtagtggacggcgacaccaagcactgcgtcatctaccgcacggccaccggcttcggcttcgcggagccctacaacctgtacgggtcgctgaaggagctggtgctgcactaccagcacgcctcgctggtgcagcacaacgacgcgctcaccgtcaccctggcgcacccagtgcgcgccccgggccccggcccgccgcctgccgcccgctgagcaccgaggacccgccccaagcagagccgcccctgggcccgtctgcgccggaggctgcggcggcgggagccacggaccagaccagccacatccaggggtcctcatttctccggctctggctcttgtttggggttctctcaccctctttctctttccttccctcccccattctccagatctccctctgtctccttttctctgtctttcttggcccctgtctctctccatgttgggggtcctaactcccccaccccatatctacgtgtcctccgggcattgccctctccatggctctggtcaccctgaccctctgccctgcccaccgcaggtcccccggggtcccggaagccccttctggctgcacctgccatgtttacagagggcccctgggctgcgcggccccagcctgggcaccctgatttttaagccatagacctggggtcagggcaggaaggaacttcactctgctgcttccgagaacctcggccgtgacattcggggccgggcgggacccgccccacagactccaacttcccctccaaaccccgaagtgaaacccgccaccgggttacccccacaagggggccgctgcgagaagttcacccacccccgaaaaaataattaaactcgcaggccaggcacggtggctcatgcctgtaatcccagcactttgggaggccaagacgggcggatcttttgaggtcgggagttggaggccagcctggccaaaatggcaaaaccccgcatctactaaaatacaaaaattagccgggcgtggtggcggccgcctgtaatcccagctacttgggaggctgaggcgtgagaatctcttgaacccaggagatggaggttgcagtgagcagagatcgtgccactgcactccagcctgggtaacagagggagactcctccgtctcaaaaaaataaataaataaacttgtgagctggccccaacccctcctaggaatcacagctccccgtactggtgccgccgcagtggccaagttgcgacactgcccacggcccctccctctgatgcagattcagggcttctcttcgatcatgttgggttttgattctgtttttccttgactgcaaaaccctctttcctctcctcttttgggacaagagccctggttttctacgctgcccttggccaccacactgcctgccccacgagctgggaggcaggttttgtacggtacgttgttattgatatgatataaaacatcaaacgtcgaaaaaaaaaaaaaaa

SEQ ID NO: 215 - DNA, 5621 bp, Homo sapiens
gtggctggagtccgggcagagcttgagggcagttggtgcggtcgggttggttcttacaccccggcgggagcgcccagacaagccgagctgactggacttctccggccggccccattcccgaggctgcggcagcttcggttccgagaccgaccggagaggagcccgagtcccggcctctgggggattcgctctctgcagaccagtgggaccccgaaacttgaacgcaatctccagcccccttttttgccttcctttgtcacttgcccgggtttctcccaacgtgttcttttttttcctcttcattctccctccttcgaaggacacaaaagtggcttccgcggaaagatttggaggcggtgggagcttttctccccggagagcgactgtgtagaaaggatttttgggaagccgctttttaacacctctgctctccgtcccccaagcctctgtgtaatcctctgaggagaaaagcccatagcttgaaagttcgggggcattttgttgtgttctgtaggagagagggggaggaccctgttcgggtagtttggccggactggtactggccgttggaaaacccgaagtacatttccgtgtggaacttttgcagatatatatttttagatttttaaataccagataaaaaatatatgccttctatatatctcctggcgacctgcccctgacagcgcgatgtacaatacggtgtggagtatggaccgcgatgacgcagactggagggaggtgatgatgccctattcgacagaactgatattttatattgaaatggatcctccagctcttccaccaaagccacctaagccaatgacttcagcagttccaaatggaatgaaggacagttctgtttctcttcaggatgcagaatggtactggggggatatttcaagggaggaggtaaatgacaaattgcgggatatgccagatgggaccttcttggtccgagatgcctcaacaaaaatgcagggagattatactttgactttgcggaagggaggcaataataagttaataaagatctatcaccgggatggtaaatatggcttttctgatcctctgacatttaattccgtggtggagctcattaaccactatcaccatgaatctcttgctcagtacaatcccaaacttgatgtgaagctgatgtacccagtgtccagataccaacaggatcagttggtaaaagaagataatattgatgcagtaggtaaaaaactgcaagaataccactctcagtatcaggagaagagtaaagagtatgataggctgtatgaagaatatactagaacatcccaggaaatacagatgaagaggactgcaatagaagcttttaatgaaacaattaaaatatttgaagagcagtgtcacacacaagaacaacatagcaaagaatatattgagcgatttcgcagagaggggaatgaaaaggagattgaacgaattatgatgaattatgataaattgaaatcacgtctgggtgagattcatgatagcaaaatgcgtctagagcaggatttgaagaatcaagctttggacaaccgagaaatagataaaaaaatgaatagcatcaaacctgacctgatccagctgcgaaagatccgagatcaacaccttgtatggctcaatcacaaaggagtgagacagaaacgcctgaatgtctggctgggaattaagaatgaggatgctgctgagaactattttatcaatgaggaagatgaaaacctgccccattatgatgagaaaacctggtttgttgaggatatcaatcgagtacaagcagaggacttgctttatgggaaacctgatggtgcattcttaattcgtgagagtagcaagaaaggatgctatgcttgctctgtggtggccgatggggaagtgaagcactgtgtgatctacagcactgctcggggctatggctttgcagagccctacaacctgtacagctctctgaaggagctagtgctccattaccagcagacatccttggttcagcacaacgactccctcaacgtcaggcttgcctaccctgttcatgcacagatgccctcgctttgcagataaagaggaagtgggaagagaggtggttctctggcatttttttctacagtttttattagactacgatgagggcattctttctacatagactgcttgttttgcacaagaagtgattttgtgaatgtgaagtggagaggccgagcagcagccggccgggatgggggcattagaggcctgaggttctctaggactcagccatgccgctgcactgacatactaagctggaagcagatgttttttttgaaagtctgtttcattggggtttttgttttgtttagccagacaccctcaacagaatattaggcttgatggttatagcgggtggggttgtatttggaagcctctgaagagaccatgtctttttaaaatctaactcttgagagtgcagcaggggcatggctctgctgggagttgtgttttgctttggcagtctctcttccccccacgaagaaggctgtttaggttttgtgatagaatgggatttgatgaaaaagacaaccaaaggaaaatggggaggcttgggatttcatttaaataatctaagccaagatgataaaaaaaaccttcaactgaaggtattttgtttcttaccaacataatttaggcttcagcatctcaccagcccctccctctgaagaagtattatgttcagaagccaacaaaacagtttgttgccagaccaatgtttgatgggaaaacgtggcactcatagttgaatgtatacttctgtaccaaaacttgaacataaaaagactagaatttgtgagttttagcaaacgctaaaattgatcactgtaactaaccccttctgtccttcctgcctgtttctctgagatgaggaatagcattctttttgtggggatggtgagctttgaatcataaaatgaagttggtgcttgtatggtgtttccttagcctaaagaatgatctgttgtttgaaacctttgtaacttgtttgtatgagtaaagaaaaggtgcaatgcagtgcttttagatggcttgatataccaaataacaatatagaacaacattattatatgtgcttccccaagtttaaaggccctgcagaaatagtaaacatggtttaatttcccttcatttccccctcctttgctggatggggttttgggagctataggttgctaaggaggggagtcagattgtggtcaggtgcctcagtaaatcacagacccaggggccctgtggtccagggtgagagtcacaccacattacacatgtgcttccatacagtggtttctgaagcttttgcagggagagaagatggcttagtgtttagactgttagtagaagccatctggaagcttttctctttgcctttttttgtgatcctgccattaaggctatgtgcagtctgccctcctgctccagtggccttgattttaggccaggaatcttctgctccatgtggcttaagccttccagctgagtgaagctaggcaaatggagtgggggcaggcatctattcctgcccccatcatgccccacacccatcagtcaacactcatttgacaaatagagtccagctgcctctgagccaatcctgggaccataataggctcagagtgagtcagctgtttgaacccaaagctgtgcagtcaggcaccctggctgagctagagaagccagtacctgcatcttggtttataaggcttacagctaggaaagctctagttctgggggtgaaagaaaaatattagtttacctgagcacttatttccatgacagggtctaaaatatggaccatgatgtagacacagatttttaattttggaaaaacctccagttactagtgacgaggatagaaagggaagtgcttctctttggctttttcttggttacactgcagtttcaggattgggtgagacagagacaaatgaacccccctctaaagtcatttaactaatagccagcacatcccttccccaaactgtcaattgaaatcttaactgaaagttttactgaataataccaagctaattgctgttgggcacacctggatggctttgcacctggtgttgaacctgctgaagcaggtggatgctcaagattacgtgcaaggaatccctcccatctggtactaaaatttcagtgtgttctgagtgtcttttaaaccaaaatggaaatacagatacagggctgtagtattcagtaatgtgtctgctccttgttgggcagacaccagcggtgtgcagggagagaccaagtaccatctttatctacacttgggctggcttgtggagaagggctgcttttttcagtcctacattccttcattttttttttcattcttgaattcattgttttgtgggatctaagacccaggggtcatttgagaggtttgacagtatcttttctgaccagttgccacatgacttgcttgaccctgagcctgtggaaatggcatagggaccagtctactacccactgggcctggtgtgtagagggggagagggtagcaaggtgcttctctacgcccatgacttgggagcaggtcttggcctccttcatgagagtctagtgccatgtcctgtcccatgatctggaccctgggactgtcttggcatcttaactgcagtttcaatgaggcagagggcaaagagagaccaagatcagaggggttcattatacccctggctagagaacccagctactgacatgcaagcagcttggggctggctggacacaggtactaggcccattgtttccaggtgaagctttcatcacagaacagtgttgtctccacctggccttagatggcacgccatgattcgggcctggatagactgcctgcgtccttaccactgatctggccaagaatgaggccctcccaacactttcactccctctccaagccttgatgggacctccacttatttaggcctcatgtgctttgaagaagctttgagagccaatgtgtcttccacgggtctcttttttgctacaagtaatcagccccatgtgttctcttaaactgagaattgcacctgggcaattcctgttttctaaggtggtctctgctgctatttaacaacccagagtaggcctctgtgaggcttcagtggcctcagaaaccagagggtccagatagggggcctgcttgggccctctgctgccaactgctcaaacctgctttagctccagccacttgtggcaaacaacctcgtttccttacaaattccagcatgtgactttggtgccgttacttgtgaaaaatctattctgttgtctttgatgtgtccaagaaaattcgtgtagtttacgtaaaaatatctgactcacaagaaagccaactgtatgtcttgtgatgggacagttcataatgtagttgctagaccactttacaaattgttcttgtcaccagatgtgttcagacattgctgtgcaattgttggggagggtagggggaaaggcgagaggagatacttattggtctttttgtttaataccttccccaagaggggacagtctggccaacttgctccagtaatgcaataaagacattgcaataaagtaaaaaaaaaaaaaaa

SEQ ID NO: 216 - DNA, 997 bp, Homo sapiens
aggcgctgcggcaggagggaagatggcggacgaggagaagctgccgcccggctgggagaagcgcatgagccgcagctcaggccgagtgtactacttcaaccacatcactaacgccagccagtgggagcggcccagcggcaacagcagcagtggtggcaaaaacgggcagggggagcctgccagggtccgctgctcgcacctgctggtgaagcacagccagtcacggcggccctcgtcctggcggcaggagaagatcacccggaccaaggaggaggccctggagctgatcaacggctacatccagaagatcaagtcgggagaggaggactttgagtctctggcctcacagttcagcgactgcagctcagccaaggccaggggagacctgggtgccttcagcagaggtcagatgcagaagccatttgaagacgcctcgtttgcgctgcggacgggggagatgagcgggcccgtgttcacggattccggcatccacatcatcctccgcactgagtgagggtggggagcccaggcctggcctcggggcagggcagggcggctaggccggccagctcccccttgcccgccagccagtggccgaaccccccactccctgccaccgtcacacagtatttattgttcccacaatggctgggagggggcccttccagattgggggccctggggtccccactccctgtccatccccagttggggctgcgaccgccagattctcccttaaggaattgacttcagcaggggtgggaggctcccagacccagggcagtgtggtgggaggggtgttccaaagagaaggcctggtcagcagagccgccccgtgtccccccaggtgctggaggcagactcgagggccgaattgtttctagttaggccacgctcctctgttcagtcgcaaaggtgaacactcatgcggcccagccatgggccctctgagcaactgtgcagcaccctttcacccccaattaaacccagaaccact

SEQ ID NO: 217 - DNA, 2250 bp, Homo sapiens
tgggagtccgtgctcctgctcctcggttggctcctaagtgccccgccaggtcccctctcctttcgctctcccggctccggctcccgactcttcggcccgctggcatctgcttccctcccctgcctcgtttctcgtcgcccctgctcgctccccccggcgctcgcccgggcgctgtgctcgctcctggatcgccagccgcgcagccgggctcggccggccgcccgcgcgccactgtgcagtggagtttggtggaatctctgctgacgtcacgtcactccccacacggagtaggagcagagggaagagagagggatgagagggagggagaggagagagagtgcgagaccgagcgagaaagctggagaggagcagaaagaaactgccagtggcggctagatttcggaggccccagtgcacccgtggactccttcggaacttggcaccctcaggagccctgcagtcctctcaggcccggctttcgggcgcttgccgtgcagccggaggctcggctcgctggaaatcgccccgggaagcagtgggacgcggagacagcagctctctcccggtagccgataacggggaatggagaccaactgccgcaaactggtgtcggcgtgtgtgcaattaggcgtgcagccggcggccgttgaatgtctcttctccaaagactccgaaatcaaaaaggtcgagttcacggactctcctgagagccgaaaagaggcagccagcagcaagttcttcccgcggcagcatcctggcgccaatgagaaagataaaagccagcaggggaagaatgaggacgtgggcgccgaggacccgtctaagaagaagcggcaaaggcggcagcggactcactttaccagccagcagctccaggagctggaggccactttccagaggaaccgctacccggacatgtccacacgcgaagaaatcgctgtgtggaccaaccttacggaagcccgagtccgggtttggttcaagaatcgtcgggccaaatggagaaagagggagcgcaaccagcaggccgagctatgcaagaatggcttcgggccgcagttcaatgggctcatgcagccctacgacgacatgtacccaggctattcctacaacaactgggccgccaagggccttacatccgcctccctatccaccaagagcttccccttcttcaactctatgaacgtcaaccccctgtcatcacagagcatgttttccccacccaactctatctcgtccatgagcatgtcgtccagcatggtgccctcagcagtgacaggcgtcccgggctccagtctcaacagcctgaataacttgaacaacctgagtagcccgtcgctgaattccgcggtgccgacgcctgcctgtccttacgcgccgccgactcctccgtatgtttatagggacacgtgtaactcgagcctggccagcctgagactgaaagcaaagcagcactccagcttcggctacgccagcgtgcagaacccggcctccaacctgagtgcttgccagtatgcagtggaccggcccgtgtgagccgcacccacagcgccgggatcctaggaccttgccggatggggcaactccgcccttgaaagactgggaattatgctagaaggtcgtgggcactaaagaaagggagagaaagagaagctatatagagaaaaggaaaccactgaatcaaagagagagctcctttgatttcaaagggatgtcctcagtgtctgacatctttcactacaagtatttctaacagttgcaaggacacatacacaaacaaatgtttgactggatatgacattttaacattactataagcttgttattttttaagtttagcattgttaacatttaaatgactgaaaggatgtatatatatcgaaatgtcaaattaattttataaaagcagttgttagtaatatcacaacagtgtttttaaaggttaggctttaaaataaagcatgttatacagaagcgattaggatttttcgcttgcgagcaagggagtgtatatactaaatgccacactgtatgtttctaacatattattattattataaaaaatgtgtgaatatcagttttagaatagtttctctggtggatgcaatgatgtttctgaaactgctatgtacaacctaccctgtgtataacatttcgtacaatattattgttttacttttcagcaaatatgaaacaaatgtgttttatttcatgggagtaaaatatactgcatacaaaaaaaaaaaaaaa

SEQ ID NO: 218 - DNA, 3173 bp, Homo sapiens
atggccctgtccactgagcatcctcccgccacacagaaacccgcccagccggggccaccgaccccaccccctgcctggaaacttaaaggaggccggagctgtggggagctcagagctgagatcctacaggagtccagggctggagagaaaacctctgcgaggaaagggaaggagcaagccgtgaatttaagggacgctgtgaagcaatcatggatgcaatgaagagagggctctgctgtgtgctgctgctgtgtggagcagtcttcgtttcgcccagccaggaaatccatgcccgattcagaagaggagccagatcttaccaagtgatctgcagagatgaaaaaacgcagatgatataccagcaacatcagtcatggctgcgccctgtgctcagaagcaaccgggtggaatattgctggtgcaacagtggcagggcacagtgccactcagtgcctgtcaaaagttgcagcgagccaaggtgtttcaacgggggcacctgccagcaggccctgtacttctcagatttcgtgtgccagtgccccgaaggatttgctgggaagtgctgtgaaatagataccagggccacgtgctacgaggaccagggcatcagctacaggggcacgtggagcacagcggagagtggcgccgagtgcaccaactggaacagcagcgcgttggcccagaagccctacagcgggcggaggccagacgccatcaggctgggcctggggaaccacaactactgcagaaacccagatcgagactcaaagccctggtgctacgtctttaaggcggggaagtacagctcagagttctgcagcacccctgcctgctctgagggaaacagtgactgctactttgggaatgggtcagcctaccgtggcacgcacagcctcaccgagtcgggtgcctcctgcctcccgtggaattccatgatcctgataggcaaggtttacacagcacagaaccccagtgcccaggcactgggcctgggcaaacataattactgccggaatcctgatggggatgccaagccctggtgccacgtgctgaagaaccgcaggctgacgtgggagtactgtgatgtgccctcctgctccacctgcggcctgagacagtacagccagcctcagtttcgcatcaaaggagggctcttcgccgacatcgcctcccacccctggcaggctgccatctttgccaagcacaggaggtcgcccggagagcggttcctgtgcgggggcatactcatcagctcctgctggattctctctgccgcccactgcttccaggagaggtttccgccccaccacctgacggtgatcttgggcagaacataccgggtggtccctggcgaggaggagcagaaatttgaagtcgaaaaatacattgtccataaggaattcgatgatgacacttacgacaatgacattgcgctgctgcagctgaaatcggattcgtcccgctgtgcccaggagagcagcgtggtccgcactgtgtgccttcccccggcggacctgcagctgccggactggacggagtgtgagctctccggctacggcaagcatgaggccttgtctcctttctattcggagcggctgaaggaggctcatgtcagactgtacccatccagccgctgcacatcacaacatttacttaacagaacagtcaccgacaacatgctgtgtgctggagacactcggagcggcgggccccaggcaaacttgcacgacgcctgccagggcgattcgggaggccccctggtgtgtctgaacgatggccgcatgactttggtgggcatcatcagctggggcctgggctgtggacagaaggatgtcccgggtgtgtacaccaaggttaccaactacctagactggattcgtgacaacatgcgaccgtgaccaggaacacccgactcctcaaaagcaaatgagatcccgcctcttcttcttcagaagacactgcaaaggcgcagtgcttctctacagacttctccagacccaccacaccgcagaagcgggacgagaccctacaggagagggaagagtgcattttcccagatacttcccattttggaagttttcaggacttggtctgatttcaggatactctgtcagatgggaagacatgaatgcacactagcctctccaggaatgcctcctccctgggcagaaagtggccatgccaccctgttttcagctaaagcccaacctcctgacctgtcaccgtgagcagctttggaaacaggaccacaaaaatgaaagcatgtctcaatagtaaaagataacaagatctttcaggaaagacggattgcattagaaatagacagtatatttatagtcacaagagcccagcagggcctcaaagttggggcaggctggctggcccgtcatgttcctcaaaagcacccttgacgtcaagtctccttcccctttccccactccctggctctcagaaggtattccttttgtgtacagtgtgtaaagtgtaaatcctttttctttataaactttagagtagcatgagagaattgtatcatttgaacaactaggcttcagcatatttatagcaatccatgttagtttttactttctgttgccacaaccctgttttatactgtacttaataaattcagatatatttttcacagtttttccaaaatcagagtggaatggttttgttatagatgctgtatcccactctttattcatgttcacattttaaaatcatttggaattctgcttcactcgcttaacatatacacaacacctgtaacatacaaggcaatgggctaggtgctccagaccgggaaaaggagggacaggaatgcttggtctgatgggctaatatggcatttagagaagtaccaaggtacagtggagccggtcacaaaagggcagacttgtagtagaattcagttgcaagagggattggggaatcttaaggaaaaaatagaatcttaaggaaaaaataactgggtgagacgtggactgtggacaggtgtggaaaaggcactctccatggaggtatgaatatgtagagggccaagagaggggagtacagggagaaatgagttgagcttgtctgaagtgaacttcaggaagaggaacataggctggaatttagattatgggggctctgaacaccaaactgagtttggacttaattgacttctg

SEQ ID NO: 219 - DNA, 2360 bp, Homo sapiens
acagtgcggagaccgcagccccggagcccgggccagggtccacctgtccccgcagcgccggctcgcgccctcctgccgcagccaccgagccgccgtctagcgccccgacctcgccaccatgagagccctgctggcgcgcctgcttctctgcgtcctggtcgtgagcgactccaaaggcagcaatgaacttcatcaagttccatcgaactgtgactgtctaaatggaggaacatgtgtgtccaacaagtacttctccaacattcactggtgcaactgcccaaagaaattcggagggcagcactgtgaaatagataagtcaaaaacctgctatgaggggaatggtcacttttaccgaggaaaggccagcactgacaccatgggccggccctgcctgccctggaactctgccactgtccttcagcaaacgtaccatgcccacagatctgatgctcttcagctgggcctggggaaacataattactgcaggaacccagacaaccggaggcgaccctggtgctatgtgcaggtgggcctaaagccgcttgtccaagagtgcatggtgcatgactgcgcagatggaaaaaagccctcctctcctccagaagaattaaaatttcagtgtggccaaaagactctgaggccccgctttaagattattgggggagaattcaccaccatcgagaaccagccctggtttgcggccatctacaggaggcaccgggggggctctgtcacctacgtgtgtggaggcagcctcatcagcccttgctgggtgatcagcgccacacactgcttcattgattacccaaagaaggaggactacatcgtctacctgggtcgctcaaggcttaactccaacacgcaaggggagatgaagtttgaggtggaaaacctcatcctacacaaggactacagcgctgacacgcttgctcaccacaacgacattgccttgctgaagatccgttccaaggagggcaggtgtgcgcagccatcccggactatacagaccatctgcctgccctcgatgtataacgatccccagtttggcacaagctgtgagatcactggctttggaaaagagaattctaccgactatctctatccggagcagctgaaaatgactgttgtgaagctgatttcccaccgggagtgtcagcagccccactactacggctctgaagtcaccaccaaaatgctgtgtgctgctgacccacagtggaaaacagattcctgccagggagactcagggggacccctcgtctgttccctccaaggccgcatgactttgactggaattgtgagctggggccgtggatgtgccctgaaggacaagccaggcgtctacacgagagtctcacacttcttaccctggatccgcagtcacaccaaggaagagaatggcctggccctctgagggtccccagggaggaaacgggcaccacccgctttcttgctggttgtcatttttgcagtagagtcatctccatcagctgtaagaagagactgggaagataggctctgcacagatggatttgcctgtgccacccaccagggcgaacgacaatagctttaccctcaggcataggcctgggtgctggctgcccagacccctctggccaggatggaggggtggtcctgactcaacatgttactgaccagcaacttgtctttttctggactgaagcctgcaggagttaaaaagggcagggcatctcctgtgcatgggtgaagggagagccagctcccccgacggtgggcatttgtgaggcccatggttgagaaatgaataatttcccaattaggaagtgtaacagctgaggtctcttgagggagcttagccaatgtgggagcagcggtttggggagcagagacactaacgacttcagggcagggctctgatattccatgaatgtatcaggaaatatatatgtgtgtgtatgtttgcacacttgtgtgtgggctgtgagtgtaagtgtgagtaagagctggtgtctgattgttaagtctaaatatttccttaaactgtgtggactgtgatgccacacagagtggtctttctggagaggttataggtcactcctggggcctcttgggtcccccacgtgacagtgcctgggaatgtattattctgcagcatgacctgtgaccagcactgtctcagtttcactttcacatagatgtccctttcttggccagttatcccttccttttagcctagttcatccaatcctcactgggtggggtgaggaccactcctgtacactgaatatttatatttcactatttttatttatatttttgtaattttaaataaaagtgatcaataaaatgtgatttttctgatgaaaaaaaaaaaaaaa

SEQ ID NO: 220 - DNA, 1437 bp, Homo sapiens
cagggccgagccagccccttcaccaccagccggccgcgccccgggaagggaagtttgtggcggaggaggttcgtacgggaggagggggaggcgcccacgcatctggggctgactcgctctttcgcaaaacgtctgggaggagtccctggggccacaaaactgcctccttcctgaggccagaaggagagaagacgtgcagggaccccgcgcacaggagctgccctcgcgacatgggtcacccgccgctgctgccgctgctgctgctgctccacacctgcgtcccagcctcttggggcctgcggtgcatgcagtgtaagaccaacggggattgccgtgtggaagagtgcgccctgggacaggacctctgcaggaccacgatcgtgcgcttgtgggaagaaggagaagagctggagctggtggagaaaagctgtacccactcagagaagaccaacaggaccctgagctatcggactggcttgaagatcaccagccttaccgaggttgtgtgtgggttagacttgtgcaaccagggcaactctggccgggctgtcacctattcccgaagccgttacctcgaatgcatttcctgtggctcatcagacatgagctgtgagaggggccggcaccagagcctgcagtgccgcagccctgaagaacagtgcctggatgtggtgacccactggatccaggaaggtgaagaagggcgtccaaaggatgaccgccacctccgtggctgtggctaccttcccggctgcccgggctccaatggtttccacaacaacgacaccttccacttcctgaaatgctgcaacaccaccaaatgcaacgagggcccaatcctggagcttgaaaatctgccgcagaatggccgccagtgttacagctgcaaggggaacagcacccatggatgctcctctgaagagactttcctcattgactgccgaggccccatgaatcaatgtctggtagccaccggcactcacgaacgctcactctggggaagctggttgccatgtaaaagtactactgccctgagaccaccatgctgtgaggaagcccaagctactcatgtataaatgccatgtggagatagagccccagatgtttcagccatctcagcccaggcaccagacaagtgggtgaagaagccaccttggacatgtagccccagcagatgtgatatagagaagaaacaggaaacttggctatattagtttcctagggctgcctgtgataaattattacaaactttataaactaacacattgtgtgcctatatcaaaacatcatggaaggacaggcacagtggctcatgcctgtagtcctagcactttgggagggtgagaaaggaagatctcttgagctcaggagttcaagatcagcctgggcaacacagtgagacctcatctccactaaaaataaaaaaaaattggctgg

SEQ ID NO: 221 - DNA, 6823 bp, Homo sapiens
cagatggccggggctcaacccggagtgcacgccttgcaactcaagcccgtgtgcgtgtccgacagcctcaagaagggcaccaaattcgtcaagtgggatgatgactcaactattgttactccaattattttgaggactgaccctcagggatttttcttttactggacagatcaaaacaaggagacagagctactggatctcagccttgtcaaagatgccagatgtgggagacacgccaaagctcccaaggaccccaaattacgtgaacttttggatgtggggaacatcgggcgcctggagcagcgcatgatcacagtggtgtatgggcctgacctcgtgaacatctcccatttgaatctcgtggctttccaagaagaagtggccaaggaatggacaaatgaggttttcagtttggcaacaaacctgctggcccaaaacatgtccagggatgcatttctggaaaaagcctatactaaacttaagctgcaagtcactccagaagggcgtattcctctcaaaaacatatatcgcttgttttcagcagatcggaagcgagttgaaactgctttagaggcttgtagtcttccatcttcaaggaatgattcaatacctcaagaagatttcactccagaagtgtacagagttttcctcaacaacctttgccctcgacctgaaattgataacatcttttcagaatttggtgcaaaaagcaaaccatatcttaccgttgatcagatgatggattttatcaaccttaagcagcgagatcctcggcttaatgaaatactttatccacctctaaaacaagagcaagtccaagtattgattgagaagtatgaacccaacaacagcctcgccagaaaaggacaaatatcagtggatgggttcatgcgctatctgagtggagaagaaaacggagtcgtttcacctgagaaactggatttgaatgaagacatgtctcagcccctttctcactatttcattaattcctcgcacaacacctacctcacagctggccaactggctggaaactcctctgttgagatgtatcgccaagtgctcctgtctggttgtcgctgtgtggagctggactgctggaagggacggactgcagaagaggaacctgtcatcacccatggcttcaccatgacaactgaaatatctttcaaggaagtgatagaagcaattgcggagtgtgcatttaagacttcaccttttccaattctcctttcgtttgagaaccatgtggattccccaaagcagcaagccaagatggcggagtactgccgactgatctttggggatgcccttctcatggagcccctggaaaaatatccactggaatctggagttcctcttccaagccctatggatttaatgtataaaattttggtgaaaaataagaagaaatcacacaagtcatcagaaggaagcggcaaaaagaagctctcagaacaagcctccaacacctacagtgactcctccagcatgttcgagccctcatccccaggagccggagaagctgatacggaaagtgacgacgacgatgatgatgatgactgtaaaaaatcttcaatggatgaggggactgctggaagtgaggctatggccacagaagaaatgtctaatctggtgaactatattcagccagtcaagtttgagtcatttgaaatttcaaaaaaaagaaataaaagttttgaaatgtcttccttcgtggaaaccaaaggacttgaacaactcaccaagtctccagtggaatttgtagaatataacaaaatgcagcttagcaggatatatccaaaaggaacacgtgtggattcatccaactatatgcctcagctcttctggaatgcaggttgtcagatggtggcacttaatttccagacaatggacctggctatgcaaataaatatggggatgtatgaatacaacgggaagagtggctacagattgaagccagagttcatgaggaggcctgacaagcattttgatccatttactgaaggcatcgtagatgggatagtggcaaacactttgtctgttaagattatttcaggtcagtttctttctgataagaaagttgggacttacgtggaagtagatatgtttggtttgcctgtggatacaaggaggaaggcatttaagaccaaaacatcccaaggaaatgctgtgaatcctgtctgggaagaagaacctattgtgttcaaaaaggtggttcttcctactctggcctgtttgagaatagcagtttatgaagaaggaggtaaattcattggccaccgtatcttgccagtgcaagccattcggccaggctatcactatatctgtctaaggaatgaaaggaaccagcctctgacgctgcctgctgtctttgtctacatagaagtgaaagactatgtgccagacacatatgcagatgtcatcgaagctttatcaaacccaatccgatatgtgaacctgatggaacagagagctaagcaattggctgctttgacactggaagatgaagaagaagtaaagaaagaggctgatcctggagaaacaccatcagaggctccaagtgaagcgagaacgactccagcagaaaatggggtgaatcacactacaaccctgacacccaagccaccctcccaggctctccacagccagccagctccaggttctgtaaaggcacctgccaaaacagaagatcttattcagagtgtcttaacagaagtggaagcacagaccatcgaagaactaaagcaacagaaatcgtttgtgaaacttcaaaagaaacactacaaagaaatgaaagacctggttaagagacaccacaagaaaaccactgaccttatcaaagaacacactaccaagtataatgaaattcagaatgactacttgagaaggagagccgctttggaaaagtccgccaaaaaggacagtaagaaaaaatcggaacccagcagccctgatcatggttcatcaacgattgagcaagacctcgctgctctggatgctgaaatgacccaaaagttaatagacttgaaggacaaacaacagcagcagctgcttaatcttcggcaagaacagtattatagtgaaaaataccagaagcgagaacatattaaactgcttattcaaaagttgacggatgtcgcagaagagtgtcagaacaatcagttaaagaagctcaaagaaatctgtgagaaagaaaagaaagaattaaagaagaaaatggataaaaagaggcaggagaagataacagaagctaaatccaaagacaaaagtcagatggaagaggagaagacagagatgatccggtcatatatccaggaagtggtgcagtatatcaagaggctagaagaagcgcaaagtaaacggcaagaaaaactcgtagagaaacacaaggaaatacgtcagcagatcctggatgaaaagcccaagggggaaggttcctcctcattcttgtcggaaacttgccatgaggatccctctgtttcccccaactttactccccccaaccctcaagctctcaagtggtgaccaccgtccttccggccagctgcaggtggagctggagcaagaataccaagacaaattcaaaagactgcccctcgagattttggaattcgtgcaggaagccatgaaaggaaagatcagtgaagacagcaatcacggttctgcccctctctccctgtcctcagaccctggaaaagtgaaccacaagactccctccagtgaggagctgggaggagacatcccaggaaaagaatttgatactcctctgtgaatgctcctgccaggccttcagaaattgcatggccactccagcgtcatcggactctctcttattacaaagatcactgcccaggaccatcttcccgagaagcatcccttagcctaaaatccacaccaaagggagagttccagaggaatccatgaagaattcccatgcccaggctccatgtgtcatgtggaaacctccacaggtctgctagtgaagaatgcatgtatgtgagatttttgttttctttccaatagcaaattcaaagcaagcaacttgcaggctccatggaacttttaatgaaggacagtgtcttctttgaagaaaatcaagctcgtgtttttattcgaagctctggtgtaaaatatttcaaagtcatagaaatagtttgagaaatgcatagcattatttaacactattgaacagccgactttgagcattgtttcttctaactgcccctcaactaccattatcttcaagtcaacatgcatattacattttcatcctttgctttgcaagcactggtggcttgcagtttgctaatttatttatcatagagtcatcaatgtatttgttgctgacatggttttattagatactgtagtgattcaaataagttttctatttgaaaaaaaaaatcacttgattgtatccttgcccagtgaagccatcctaagacttagcaatatggattgtacatttggctgcatgagcaagtcggccgcacacttccagacagtgtgctgtttgaattgactatttgcactcaaagtctgggtattcattggttattggcctgaaatgatcaaataactacaaatgatctgttgaataaaaatagttgagctgatatatgttaagcagatattcaatcagaatgaacaggttccggtggttattttgccgtttgacattttttatggttcatttatttttaatatagagaggaagattgaatatttatctagagaatacaaagacccacatgtaaatgataggtattatctccatgtatatatgtacccacttagtcatgtaagtgcatatacacatacacacacatgagtgtagacatgtgtttattaattgacaatgacccaaatctcttccacaagacttaaaaccaaattcagggacaaatggatagagaagaaaagggtcaaacatcgagattacatggatgttaaattatatggagacgctaagaaataattgatggagccattgatgcaaaccgaagtagatttagaacttatatgaatttgatttatattttgcaagatcaaaaattagatgttaagtatcagattttaagcttgttttaatggtcaaaaaattaggacagaaataatatggacatttattagtatcttccataatttttaagtctgacacatttctattttattctaacataaaaaaacttccattatatatttactaagtatatttaattcacttaactctgtctttataagttcctattttagatggaataagagaaacaaattatatcaaggtaaaactgatcaaaagcataattgaaagttctgaaaaaagaaaaataataatatgtagaaaaatgtaacttagagagtaacacatgaacattgaagttaaaacccagaagccagatgctcacagttttattttactttaaaataaacctgtctgactgtagctttgtgaaatatcttaaaacgcaaaaaccaattgtgtcctgaaaattgtttcaagaatttaatatttttatgaaaattattttatttaactttaagcaataactagagattacaattaaattttaatcaaaatgaaggcttagttcaaacataaggaaacagtgtttgattaaaaaaaacacatctagtaagacgtaaggggaaaatcacatcctctttggagatgattatattttgatctgaagggtttggggtgttcattagacacttaataaaacttaacttccaatgaaaaagaaatcttttgtaaatcattctacttttgcactttgaaagaaaggcgttaatcataaagaagcaagaatggtcaaaatcgaatgctgcatttttataaacaaaattacagactgtctgaaattgaagaagaatgaactaataatagcattcataaccaaacacaatgatgattattgcagaacattgtatcacattttagtccagagatagaataaagttgaataaccttgacttacacaaaactgttttggtagttggatttcattatcttagtgaatttagtcattttacaatatgtttgtatttggccatttactgtaatcacatttttatatctgtacaatgacactttttgcagttgtggggtagtgtgtaacactgtccatcttgcatcattgaaactactacaatgatactatcatttaataatattaatattacttgaaatagactaagataaagaaaaggggtctgtatgatgtgcagttttgtgcctttatgtatttgccttgttctttgtcgaatgtgtgaaattccgtactgtggtttttcctataatagaaagtagagctgtgtattaaattagactgtgtctctctgatacctttacactactgagaatagcatggttttggccatgtaaaccaattttcaaagttctaatgacatagccatgtgtttttggttttttatatttcattttaaaatttgagtatcaccatacattaattaatactcctgtagtagataagctgtcattaagtaattcccaaaaaaagggccatttgcttgcattactttgaatttaatgttgcgcttgtgcactgtgttaatattgtttgtgatggattggacgttgtgactcttgccttttaagaagaaaaaaaagataggacaaagtatttgaagctcttaaaatgtacatattttggttcttctatctcaaattatttaaaatgcataattcacatttttgtaataattctatgcaattttgtggcatgatgtttcttccacttgtaattttatgtgctttcatcacaaatccaaaggaaagaataaaaatttcttaacacaa

SEQ ID NO: 222 - DNA, 4694 bp, Homo sapiens
agaagaggcgggggcttcctgcttcagcctccttgggcagaagcagtgaccacaggcccccatggcaggcagggcgggtgggaggagggtgatttacaaggcagatgggcctctggctacagctcagtcctgcactcagccagggccaccccaggggctataagagcaactagatttctggagcagctcggggatgggtgccatttgagcccagcttggctccccctcctggctggcctccttcctgcccttctgcctgcctgtgtctgctgagattctgcaaagaggaacgcttggcaccatgtctctgctcaaccctgtcctgctgccccccaaggtgaaggcctatctgagccaaggggagcgcttcatcaaatgggatgatgaaactacagttgcctctccagttatcctccgtgtggatcctaagggctactacttatactggacgtatcaaagtaaggagatggagtttctggatatcaccagcatccgggatactcgctttgggaagtttgccaagatgcccaagagccagaagctccgggacgtcttcaacatggactttcctgataacagtttcctgctgaagacactcacggtggtgtccggcccggacatggtggacctcaccttccacaacttcgtctcctacaaggagaacgtgggcaaggcctgggctgaggacgtactggccctagtcaaacatccgctgacggccaacgcctcccgcagcaccttcctggacaagatccttgtgaagctcaagatgcagctcaactctgaagggaagattccggtgaagaactttttccagatgtttcctgctgaccgcaagcgggtggaagctgctctcagtgcctgccacctccccaaaggcaaaaatgacgccatcaatcctgaggacttcccagaacctgtctacaagagtttcctcatgagcctctgtcctcggccagaaatagatgagatcttcacttcttaccatgctaaggccaaaccctacatgacgaaggagcacctgaccaaattcatcaaccagaaacagcgggactcccggcttaactccctgctgttcccgccagcacggcctgaccaggtgcagggcctcatcgacaagtatgagcccagtggcatcaatgcacagaggggccagctgtcacctgaaggcatggtctggtttctctgtgggccagagaacagcgtgctggcccaggacaagctgctgctccaccacgacatgacgcagccactcaatcattacttcatcaactcgtcccacaacacctacctgacagccggccagttctcaggcctctcctcggctgagatgtaccgccaggtgctgctctctggctgccgttgcgtggagctagactgctggaaggggaaaccccctgacgaggagcccattatcacccatggcttcaccatgaccacagacatcttcttcaaagaagcaattgaggctattgcagaaagcgcctttaagacctccccctatcccatcatcctgtcgtttgagaaccatgtggactcaccccgccagcaggctaagatggctgagtattgccggacgatctttggggatatgctgctcacagagcccctggaaaagttcccactaaaaccaggtgtccccctgcccagccctgaggatctcaggggcaagatcctcatcaagaacaagaagaaccagttttctggccccacctcctccagtaaggatactggtggggaggctgagggcagcagcccacccagtgcccctgcaggtgagggcacagtgtgggctggcgaggaagggactgagctggaggaggaggaggtggaagaggaagaggaggaggagtcaggaaacctggatgaagaagagattaagaagatgcagtcggatgagggcacagcgggcctggaagtgacggcttatgaggagatgtccagcctagtcaattacatccagcccaccaagttcgtctcctttgagttctctgcccaaaagaaccgaagttatgtcatctcgtccttcacagagctcaaggcatatgacctgctctccaaggcctcggtgcagtttgtggactacaacaagcgccagatgagccgcatttaccccaagggaacccgcatggactcctccaactacatgccccagatgttctggaatgctggatgccagatggttgccctcaacttccagacgatggacttgcccatgcagcagaacatggcagtatttgagttcaacgggcagagcggctacctcctcaagcatgagttcatgcgccggccggacaagcagttcaaccccttctcagtggaccgcatcgacgtggtggtggccaccaccctttccattacggtgatctctgggcagttcctgtcagaacgcagcgtgcgcacctatgtagaagtggagctgtttggccttcctggggaccccaagaggcgctatcgaactaagctgtcacccagtactaactccatcaatcctgtctggaaggaggagccctttgtctttgagaagatcttgatgcctgagctggcctccctcagagtggctgtgatggaggaaggcaacaagtttcttggacaccgcatcatccccatcaatgccctaaattctgggtaccaccacctgtgcctgcacagtgagagcaacatgcccctcaccatgcctgcgctcttcatcttcctggagatgaaggactacatacctggtgcttgggcagatctcactgtggccctcgccaaccccattaagttcttcagtgcccatgacacgaagtctgtgaagctcaaggaggccatgggaggtctgcctgagaagcccttcccactggcgagtccagttgccagccaggtcaatggggcgttggccccaacgagcaatgggtcaccagcagccagggccggggccagggaagaggctatgaaagaagctgcggagccgcggaccgccagcctggaggagctccgggagctaaagggcgtggtgaagctgcagcggcggcacgagaaggagctgcgagagttggagcggcgcggagcgcggcgctgggaggagctgctgcagcggggcgcggcgcagctggcggagctcgggccaccgggcgtggggggcgtcggggcctgcaagctcggtcccggcaagggctctcgcaagaagaggagcctgccccgcgaggagagcgccggagccgcgccgggcgagggccctgagggcgtggacgggcgcgtgcgggagctgaaagacaggctggagctggagctgctgcggcagggcgaggagcagtacgagtgcgttctgaagcgcaaggagcagcacgtggccgagcaaatctccaaaatgatggagctggccagagagaaacaggcggcagagctgaaggccctgaaggagacgtcggagaacgacaccaaagagatgaagaaaaagctggagacaaagagactggagcggatccagggcatgaccaaagtcaccacagacaagatggcccaggagaggttgaagagagagattaacaactcccacatccaggaagtagtgcaggtgatcaagcagatgacggagaacttggagaggcaccaggagaagctggaggagaagcaggcggcttgcctggaacagatacgggagatggaaaagcagttccagaaggaggcgctggcagagtacgaggccaggatgaagggtctggaggcagaggtgaaggagtcggtgagggcctgcctcaggacctgctttccctccgaggccaaggacaagcctgagagggcctgcgagtgccccccagagctgtgtgagcaggacccactcatagcaaaggcagatgcccaggagagccgcctctgatgcccccatcccactgggacatttagcaaggaggttcagccccttctctgggatgtggttctattcccccaggaaaaaggagccccagccttctgaggctgtgggaacctgtggctgccttggacgctgcagccccctcctcaacggccaggccagagtctgagacaggacccaggcaccctcacggcagggcctctctggggcctagaagtcttctcaagctgacttcctacctccccctccatctctagataagtgtcatatatttgttgagggcaaaagactatggactggaaggcagaaagtgggatcctggccccactctgcctttcctattgagcaaccagctctgggctcagtttcctcacctggagggttggacccactcacctccactctagccccgaaccctcctgccccaggcttccaggccccatcaggcctgccctgagttggccttgtccactccttgaggcagatcctggcactacctcacagctccctggggacggccactccctggctgagggccctcccctcccctctgcctgtccggaacgggaggctgaaatggaaaagctgccttggccctgcttggctgagtcacaaggggcagtgggctcttgggtgctgttccaccctgaccctggctcacccctcttcctaggcctgggggcaggcagttcctaccatgtacccctctcaggctgcctgcctgacaaggtcagcatcatttgctctcctgaatttatgaggtttatttatttttctctttcctactcctattaaagaacctcgtcccagtgtttcctgcttaaaaaaaaaaaaaaaaaaa

SEQ ID NO: 223 - DNA, 3705 bp, Homo sapiens
atggcgggcgcccagcccggcgtccacgcgctgcagttggagccgcccaccgtggtggagaccctgcggcgcgggagtaagttcatcaaatgggacgaggagacctccagtcggaacctggtgaccctgcgtgtggaccccaatggcttcttcttgtactggacgggccccaacatggaggtggacacactggacatcagttccatcagggacacacggacaggccggtacgcccgcctgcccaaggaccccaagatccgggaagttctgggctttgggggtcccgatgcccggctggaggagaagctgatgacggtggtgtctgggccagacccggtgaacacagtgttcttgaacttcatggccgtgcaggatgacacagccaaggtctggtctgaggagctattcaagctggctatgaacatcctggctcagaacgcctcccggaacaccttcctgcgcaaagcatacacgaagctgaagctgcaggtgaaccaggatggtcggatccccgtcaagaacatcctgaagatgttctcagcagacaagaagcgggtggagactgcgctggaatcctgtggcctcaaattcaaccggagtgagtccatccggcctgatgagttttccttggaaatctttgagcggttcctgaacaagctgtgtctgcggccggacattgacaagatcctgctggagataggcgccaagggcaagccatacctgacgctggagcagctcatggacttcatcaaccagaagcaacgcgacccgagactcaacgaagtgctgtacccgcccctgcggccctcccaggcccggctgctcatcgaaaagtatgagcccaaccagcagtttctggagcgagaccagatgtccatggagggctttagccgctacctgggaggcgaggagaatggcatcctgcccctggaagccctggatctgagcacggacatgacccagccactgagtgcctacttcatcaactcctcgcataacacctatctcactgcggggcagctggctgggacctcgtcggtggagatgtaccgccaggcactactatggggctgccgctgcgtggagctggacgtgtggaagggacggccgcctgaggaggaacccttcattacccacggcttcaccatgaccacagaggtgcctctgcgcgacgtgctggaggccattgccgagactgccttcaagacctcgccctaccccgtcatcctctccttcgagaaccatgtggactcggcaaagcaacaggcaaagatggctgagtactgccgctccatctttggagacgcgctactcatcgagcctctggacaagtacccgctggccccaggcgttcccctgcccagcccccaggacctgatgggccgtatcctggtgaagaacaagaagcggcaccgacccagcgcaggtggcccagacagcgccgggcgcaagcggcccctggagcagagcaattctgccctgagcgagagctccgcggccaccgagccctcctccccgcagctggggtctcccagctctgacagctgcccaggcctgagcaatggggaggaggtagggcttgagaagcccagcctggagcctcagaagtctctgggtgacgagggcctgaaccgaggcccctatgttcttggacctgctgaccgtgaggatgaggaggaagatgaggaagaggaggaacagacagaccccaaaaagccaactacagatgagggcacagccagcagcgaggtgaatgccactgaggagatgtccacgcttgtcaactacatcgaacctgtcaagttcaagtcctttgaggctgctcgaaagaggaacaaatgcttcgagatgtcgtcctttgtggagaccaaggccatggagcaactgaccaagagccccatggagtttgtggaatacaacaagcagcagctcagccgcatctaccccaagggcacccgcgtggactcctccaactacatgccccagctcttctggaacgtagggtgccagcttgttgcgctcaacttccagaccctcgatgtggcgatgcagctcaacgcgggcgtttttgagtacaacgggcgcagcgggtacctgctcaagccggagttcatgcggcggccggacaagtccttcgaccccttcactgaggtcatcgtggatggcatcgtggccaatgccttgcgggtcaaggtgatctcagggcagttcctgtccgacaggaaggtgggcatctacgtggaggtggacatgtttggcctccctgttgatacgcggcgcaagtaccgcacccggacctctcaggggaactcgttcaaccccgtgtgggacgaagagcccttcgacttccccaaggtggtgctgcccacgctggcttcacttcgcattgcagcctttgaggaggggggtaaattcgtagggcaccggatcctgcctgtctctgccatccgctccggataccactacgtctgcctgcggaacgaggccaaccaaccgctgtgcctgccggccctgctcatctacaccgaagcctcggactacattcctgacgaccaccaggactatgcggaggccctgatcaaccccattaagcacgtcagcctgatggaccagagggcccggcagctggccgccctcattggggagagtgaggctcaggctggccaagagacgtgccaggacacccagtctcagcagctggggtctcagccgtcctcaaaccccacccccagcccactggatgcctccccccgccggccccctggccccaccacctcccctgccagcacctccctcagcagcccagggcagcgtgatgatctcatcgccagcatcctctcagaggtggcccccaccccgctggatgagctccgaggtcacaaggctctggtcaagctccggagccggcaagagcgagacctgcgggagctgcgcaagaagcatcagcggaaggcagtcaccctcacccgccgcctgctggatggcctggctcaggcacaggctgagggcaggtgccggctgcggccaggtgccctaggtggggccgctgatgtggaggacacgaaggagggggaggacgaggcaaagcggtatcaggagttccagaacagacaggtgcagagcctgctggagctgcgggaggcccaggtggacgcagaggcccagcggaggctggaacacctgagacaggctctgcagcggctcagggaggtcgtccttgatgcaaacacaactcagttcaagaggctgaaagagatgaacgagagggagaagaaggagctgcagaagatcctggacagaaagcgccataacagcatctcggaggccaagatgagggacaagcataagaaggaggcggaactgacggagattaaccgtcggcacatcactgagtcagtcaactccatccgtcggctggaggaggcccagaagcagcggcatgaccgtcttgtggctgggcagcagcaggtcctgcaacagctggcagaagaggagcccaagctgctggcccagctggcccaggagtgtcaggagcagcgggcgaggctcccccaggagatccgccggagcctgctgggcgagatgccggaggggctgggggacgggcctctggtggcctgtgccagcaacggtcacgcacccgggagcagcgggcacctgtcgggcgctgactcggagagccaggaggagaacacgcagctctga

SEQ ID NO: 224 - DNA, 5509 bp, Homo sapiens
aggaaaagacaatttctctctgattcagaatcctgaaaatgtgatctcccttaaaaagaggacagtgctgctgtgagtttgacgaagtggacatcacctgcagtcagtccagagctgcccagtcttgaatataatcatggccaaaccttatgaatttaactggcagaaggaagttccctcctttttgcaagaaggaacagtttttgacagatacgaggaggaatcctttgtgtttgaacccaactgcctcttcaaagtggatgagtttggcttctttctgacatggagaagtgaaggcaaggaaggacaggtgctagaatgctccctcatcaacagtattcggtcgggagccataccaaaggatcccaaaatcttggctgctcttgaagctgttggaaaatcagaaaatgatctggaagggcggatagtttgtgtctgcagtggcacagatctagtgaacattagttttacctacatggtggctgaaaatccagaagtaactaagcaatgggtagaaggcctgagatcaatcatacacaacttcagggccaacaacgtcagtccaatgacatgcctcaagaaacactggatgaaattggcatttatgaccaacacaaatggtaaaattccagttaggagtattactagaacatttgcatcgggaaaaacagaaaaggtgatctttcaagcactcaaggagttaggtcttcccagtggaaagaatgatgaaattgagcccacagcattttcttatgaaaagttctatgaactgacacaaaagatttgtcctcggacagatatagaagatcttttcaaaaaaatcaatggagacaaaactgattatttaacggtagaccaattagtgagctttctaaatgaacatcaacgagatcctcgattgaatgaaattttatttccattttatgatgccaaaagggcaatgcagatcattgagatgtatgaacctgatgaagatttgaagaaaaaaggccttatatcaagtgatgggttttgcagatatctgatgtcagatgaaaacgccccagtcttcctagatcgtttagaactttaccaagaaatggaccatcctctggctcactacttcatcagttcttcccataacacttatctcactggcagacagttcggcgggaagtcttcggtagaaatgtacagacaggttctcctggctggttgcagatgtgttgaacttgactgctgggatggaaaaggtgaagaccaagaaccaataataactcatggaaaagcaatgtgtacagatatcctttttaaggatgtaattcaagccatcaaggaaactgcatttgtcacatcagaatatcctgtaattctctcctttgaaaatcactgcagcaaatatcaacagtacaagatgtccaaatattgcgaagatctatttggggatctcctgttgaaacaagcacttgaatcacatccacttgaaccaggcagggctttgccatcccccaatgacctcaaaagaaaaatactcataaaaaacaagcggctgaaacctgaagttgaaaaaaaacagctggaagctttgagaagcatgatggaagctggagaatctgcctccccagcaaacatcttagaggacgataatgaagaggagatcgaaagtgctgaccaagaggaggaagctcaccccgaattcaaatttggaaatgaactttctgctgatgacttgggtcacaaggaagctgttgcaaatagcgtcaagaagggcctggtcactgtagaagatgagcaggcgtggatggcatcttataaatatgtaggtgctaccactaatatccatccatatttgtccacaatgatcaactacgcccagcctgtaaagtttcaaggtttccatgtggcagaagaacgcaatattcattataacatgtcttcttttaatgaatcagtcggtcttggctacttgaagacacatgcaattgaatttgtcaattataacaaacggcaaatgagtcgcatttaccccaagggaggccgagtcgattccagtaattacatgcctcagattttctggaacgctggctgccagatggtttcactgaactatcaaaccccagatttagcgatgcaattgaatcagggaaaatttgagtataatggatcgtgcgggtaccttctcaaaccagatttcatgaggcggcctgatcgaacatttgaccccttctctgaaactcctgttgatggtgttattgcagccacttgctcagtgcaggttatatcaggtcaattcttatcagataagaaaattggcacctacgtagaggtggatatgtatgggttgcccactgacaccatacgtaaggaattccgaactcgcatggttatgaataatggactcaatccagtttacaatgaagagtcatttgtatttcggaaggtgatcctgccggacctggctgtcttgagaatagctgtgtatgatgataacaacaagctgattggccagaggatcctcccgcttgatggcctccaagccggatatcgacacatttcccttcgaaatgagggaaataaaccattatcactaccaacaattttctgcaatattgttcttaaaacatatgtgcctgatggatttggagatatcgtggatgctttatcagatccaaagaaatttctctcaattacagaaaagagagcagaccaaatgagagctatgggcattgaaactagtgacatagccgacgtgcccagtgacacttccaaaaatgacaagaaaggaaaggccaacaccgccaaagcaaatgtgacccctcagagtagctctgagctcagaccaaccaccacggctgccctggcctctggtgtggaagccaagaaaggtattgaacttatccctcaagtaaggatagaagacttaaagcagatgaaggcttacttgaagcatttaaagaaacagcagaaggagctaaattctttaaagaagaaacatgcaaaggaacacagtaccatgcagaagttacactgcacgcaagttgacaaaattgtggcacagtatgacaaagagaagtcgactcatgagaaaatcctagagaaggcaatgaagaagaaggggggaagtaattgtctcgaaatgaaaaaagaaacagaaatcaaaattcagacgctgacatcagatcacaaatctaaggtcaaagagattgtagcacagcacacaaaggaatggtcagaaatgatcaatacccacagtgctgaggagcaagaaatccgagacctgcacctcagccagcagtgtgagctgctgaaaaagctactcatcaatgcccacgagcagcaaacccagcagctgaaactgtcccatgacagggaaagcaaggaaatgcgagcacaccaggctaagatttctatggaaaatagcaaagccatcagccaagataaatctatcaagaataaagcagaacgggaaaggcgagtcagggagttaaacagcagcaacactaaaaagtttctggaagaaagaaagagacttgccatgaagcagtccaaagaaatggatcagttgaaaaaagtccagcttgaacatctagaattcctagagaaacagaatgagcaggcgaaggagatgcagcagatggtgaaattggaagccgagatggaccgcagaccagcaacagtagtatgaaactccaaaatgcaaactgaagcagcaaacccacaaagcatcaaaagactcactcacaaacttctgaacacaaactccatggatgaaagctgtttattttgtttcctttatgtgtaaacaagatgatatctgaaaccagagagacttggaatgtctgactgacttctatttaacagcttgagtattgcatttccttggccaaacaaaaatagctacaaatccacaaaaatttactattccagtaaggcagagtccaaccattgataatacaacttaaacatgtttgctataaaataccatcacaagtaaatgagcttggtgtgaacaactctcctttgtgatgccttaggacatgtttgaactgcagcaaaaaacaaaaacaaaaaacagtgcattagcaatttcatagcaagtgcatgcactaggaaaagaaaactctgtctacaagtttattagcagaagtggtggtctgctagacaaataattttgcaaaatttttctacatctaagttacctcatcagtaagtgccatgtctctaccatgccatcagaggctaatttcctgtaaaagttgtggaaattgttagaacaatagaaaaatagagcagtgtatgtgtgccaaaactcatcattactcaaaggagaactgtgttaggcacatttaagaaagtttacatctgacattgctttataggaattgtttctgcagattccggatattataattcacaccataaagattgtgaagtggttattggcaaacgtttgtaaatgtgaccatgtataaagtatttatactctttaattcacactgttagagagcaaaatcatctaagtattgccacatgacaagattagtaaacaggaatactagaactatgtttgcatgatacacaagcaccaataaagactaatccatacacagttaacctaatgccaaataaatactggttaaataaatgtatggcacagaatataatttgactatcaagacttttagcataatgaaaaaccctctctctatatatatatgtgtatatgaattatgtgggcattcttgatacttcaagttctagtttgaaaaaaatacataactaatttaattttacacaaaaatatttatgcagattttcagaatttcatatcaggaaatgacctttttatgtctgttaaatatcaaaacaatttgctacagtgttaatctgcatggtctttaagcctgctgtagttgagttgcagacagtgcatgaaaaagtattccgctgggaattgagccatgccaccaaagccaagaggagcgcatggaaacccggtagtctagaactaatcagattactgattttagggcacagcaccagatgaattgttgtatatgcttgtaaaaattgattctgtgtgttcctctgaacaaagcggagaaaatgatgataccatcaatattgaaattaaacttccaacttctctaataaaaaattaaaacacgcataacactcgtcaagagtatttgctcccaagacacattctagcaaatgttttgcctttttcatatacatgatatcatcgttattttcaaagggggcttattaataccctcagcatgtttttcacccaaatgatgcaaaacatgcagattctagttgacttcagttgtaatagacttgtttttctcctatttatgatttgaagtggattctgtaaaatatctcttgttcttagtttccttatctgtaaaacagtggagttagactacatatcttttggcactaacatctcatgaaaaattatggttaataaaatatcaccacatttggattgccaattttcaaaaaaaaaaaaaaaaaaaaa

SEQ ID NO: 225 - DNA, 2732 bp, Homo sapiens
aacaacatcctgggattgggacccactttctgggcactgctggccagtcccaaaatggaacataaggaagtggttcttctacttcttttatttctgaaatcaggtcaaggagagcctctggatgactatgtgaatacccagggggcttcactgttcagtgtcactaagaagcagctgggagcaggaagtatagaagaatgtgcagcaaaatgtgaggaggacgaagaattcacctgcagggcattccaatatcacagtaaagagcaacaatgtgtgataatggctgaaaacaggaagtcctccataatcattaggatgagagatgtagttttatttgaaaagaaagtgtatctctcagagtgcaagactgggaatggaaagaactacagagggacgatgtccaaaacaaaaaatggcatcacctgtcaaaaatggagttccacttctccccacagacctagattctcacctgctacacacccctcagagggactggaggagaactactgcaggaatccagacaacgatccgcaggggccctggtgctatactactgatccagaaaagagatatgactactgcgacattcttgagtgtgaagaggaatgtatgcattgcagtggagaaaactatgacggcaaaatttccaagaccatgtctggactggaatgccaggcctgggactctcagagcccacacgctcatggatacattccttccaaatttccaaacaagaacctgaagaagaattactgtcgtaaccccgatagggagctgcggccttggtgtttcaccaccgaccccaacaagcgctgggaactttgcgacatcccccgctgcacaacacctccaccatcttctggtcccacctaccagtgtctgaagggaacaggtgaaaactatcgcgggaatgtggctgttaccgtttccgggcacacctgtcagcactggagtgcacagacccctcacacacataacaggacaccagaaaacttcccctgcaaaaatttggatgaaaactactgccgcaatcctgacggaaaaagggccccatggtgccatacaaccaacagccaagtgcggtgggagtactgtaagataccgtcctgtgactcctccccagtatccacggaacaattggctcccacagcaccacctgagctaacccctgtggtccaggactgctaccatggtgatggacagagctaccgaggcacatcctccaccaccaccacaggaaagaagtgtcagtcttggtcatctatgacaccacaccggcaccagaagaccccagaaaactacccaaatgctggcctgacaatgaactactgcaggaatccagatgccgataaaggcccctggtgttttaccacagaccccagcgtcaggtgggagtactgcaacctgaaaaaatgctcaggaacagaagcgagtgttgtagcacctccgcctgttgtcctgcttccagatgtagagactccttccgaagaagactgtatgtttgggaatgggaaaggataccgaggcaagagggcgaccactgttactgggacgccatgccaggactgggctgcccaggagccccatagacacagcattttcactccagagacaaatccacgggcgggtctggaaaaaaattactgccgtaaccctgatggtgatgtaggtggtccctggtgctacacgacaaatccaagaaaactttacgactactgtgatgtccctcagtgtgcggccccttcatttgattgtgggaagcctcaagtggagccgaagaaatgtcctggaagggttgtgggggggtgtgtggcccacccacattcctggccctggcaagtcagtcttagaacaaggtttggaatgcacttctgtggaggcaccttgatatccccagagtgggtgttgactgctgcccactgcttggagaagtccccaaggccttcatcctacaaggtcatcctgggtgcacaccaagaagtgaatctcgaaccgcatgttcaggaaatagaagtgtctaggctgttcttggagcccacacgaaaagatattgccttgctaaagctaagcagtcctgccgtcatcactgacaaagtaatcccagcttgtctgccatccccaaattatgtggtcgctgaccggaccgaatgtttcatcactggctggggagaaacccaaggtacttttggagctggccttctcaaggaagcccagctccctgtgattgagaataaagtgtgcaatcgctatgagtttctgaatggaagagtccaatccaccgaactctgtgctgggcatttggccggaggcactgacagttgccagggtgacagtggaggtcctctggtttgcttcgagaaggacaaatacattttacaaggagtcacttcttggggtcttggctgtgcacgccccaataagcctggtgtctatgttcgtgtttcaaggtttgttacttggattgagggagtgatgagaaataattaattggacgggagacagagtgacgcactgactcacctagaggctgggacgtgggtagggatttagcatgctggaaataactggcagtaatcaaacgaagacactgtccccagctaccagctacgccaaacctcggcattttttgtgttattttctgactgctggattctgtagtaaggtgacatagctatgacatttgttaaaaataaactctgtacttaactttgatttgagtaaattttggtttt

SEQ ID NO: 226 - DNA, 1867 bp, Homo sapiens
cgccgctctgggagccgctgctggtcccggccttgcggcctgcgggggaggctgcccggaggaggcagcggcggcggcagcgcgtcctcggtccccaggaccacggcttctttcctgccagatctatccatctggccatccatccgtgggggtctgcaatggccacctttagccgccaggaatttttccagcagctactgcaaggctgtctcctgcctactgcccagcagggccttgaccagatctggctgctccttgccatctgcctcgcctgccgcctcctctggaggctcgggttgccatcctacctgaagcatgcaagcaccgtggcaggcgggttcttcagcctctaccacttcttccagctgcacatggtttgggtcgtgctgctcagcctcctgtgctacctcgtgctgttcctctgccgacattcctcccatcgaggcgtcttcctatccgtcaccatcctcatctacctactcatgggtgagatgcacatggtagacaccgtgacatggcacaagatgcgaggggcacagatgattgtggccatgaaggcagtgtctctgggcttcgacctggaccggggcgaggtgggtacggtgccctcgccagtggagttcatgggctacctctacttcgtgggcaccatcgtcttcgggccctggatatccttccacagctacctacaagctgtccaaggccgcccactgagctgccggtggctgcagaaggtggcccggagcctggcactggccctgctgtgccttgtgctgtccacttgcgtgggcccctacctcttcccgtacttcatccccctcaacggtgaccgcctccttcgcaacaagaaacgcaaagccaggtggctgcgagcctacgagagtgctgtctccttccacttcagcaactattttgtgggctttctttccgaggccacggccacgttggcgggggctggctttaccgaggagaaggatcacctggaatgggacctgacggtgtccaagccactgaatgtggagctgcctcggtcaatggtggaagttgtcacaagctggaacctgcccatgtcttattggctaaataactatgttttcaagaatgctctccgcctggggaccttctcggctgtgctggtcacctatgcagccagcgccctcctacatggcttcagtttccacctggctgcggtcctgctgtccctggcttttatcacttacgtggagcatgtcctccggaagcgcctggctcggatcctcagtgcctgtgtcttgtcaaagcggtgcccgccagactgttcgcaccagcatcgcttgggcctgggggtgcgagccttaaacttgctctttggagctctggccatcttccacctggcctacctgggctccctgtttgatgtcgatgtggatgacaccacagaggagcagggctacggcatggcatacactgtccacaagtggtcagagctcagctgggccagtcactgggtcacttttggatgctggatcttctaccgtctcataggctgaggcacatctgtggaccctcataaccctcttaagacccctctcagggtgccactgatgggggatgagggaaggccctctctctactccttgaccccctccatccttgacccccaacacctcaacacacacacacacacacacacacaaaatcacaccattttcatgcctgtcaatccccaccccaccacaaggcaggaagggggtggtgcctgctggggcctagagggggatgcttggggaaacagagaaggggagatccagggcctccccgccttccttcttcctttttatatacaatttgttattgtcaaataaaagtaggaaatattcaataggct

SEQ ID NO: 227 - DNA, 3734 bp, Homo sapiens
gcggagcgtgtgacgctgcggccgccgcggacctggggattaatgggaaaagttttggcaggagcgggagaattctgcggagcctgcgggacggcggcggtggcgccgtaggcagccgggacagtgttgtacagtgttttgggcatgcacgtgatactcacacagtggcttctgctcaccaacagatgaagacagatgcaccaacgaggctgatgggaaccaccctgtagaggtccatctgcgttcagacccagacgatgccagagctatgactgggcctgcaggtgtggcgccgaggggagatcagccatggagcagccacaggaggaagcccctgaggtccgggaagaggaggagaaagaggaagtggcagaggcagaaggagccccagagctcaatgggggaccacagcatgcacttccttccagcagctacacagacctctcccggagctcctcgccaccctcactgctggaccaactgcagatgggctgtgacggggcctcatgcggcagcctcaacatggagtgccgggtgtgcggggacaaggcatcgggcttccactacggtgttcatgcatgtgaggggtgcaagggcttcttccgtcgtacgatccgcatgaagctggagtacgagaagtgtgagcgcagctgcaagattcagaagaagaaccgcaacaagtgccagtactgccgcttccagaagtgcctggcactgggcatgtcacacaacgctatccgttttggtcggatgccggaggctgagaagaggaagctggtggcagggctgactgcaaacgaggggagccagtacaacccacaggtggccgacctgaaggccttctccaagcacatctacaatgcctacctgaaaaacttcaacatgaccaaaaagaaggcccgcagcatcctcaccggcaaagccagccacacggcgccctttgtgatccacgacatcgagacattgtggcaggcagagaaggggctggtgtggaagcagttggtgaatggcctgcctccctacaaggagatcagcgtgcacgtcttctaccgctgccagtgcaccacagtggagaccgtgcgggagctcactgagttcgccaagagcatccccagcttcagcagcctcttcctcaacgaccaggttacccttctcaagtatggcgtgcacgaggccatcttcgccatgctggcctctatcgtcaacaaggacgggctgctggtagccaacggcagtggctttgtcacccgtgagttcctgcgcagcctccgcaaacccttcagtgatatcattgagcctaagtttgaatttgctgtcaagttcaacgccctggaacttgatgacagtgacctggccctattcattgcggccatcattctgtgtggagaccggccaggcctcatgaacgttccacgggtggaggctatccaggacaccatcctgcgtgccctcgaattccacctgcaggccaaccaccctgatgcccagtacctcttccccaagctgctgcagaagatggctgacctgcggcaactggtcaccgagcacgcccagatgatgcagcggatcaagaagaccgaaaccgagacctcgctgcaccctctgctccaggagatctacaaggacatgtactaacggcggcacccaggcctccctgcagactccaatggggccagcactggaggggcccacccacatgacttttccattgaccagcccttgagcacccggcctggagcagcagagtcccacgatcgccctcagacacatgacacccacggcctctggctccctgtgccctctctcccgcttcctccagccagctctcttcctgtctttgttgtctccctctttctcagttcctctttcttttctaattcctgttgctctgtttcttcctttctgtaggtttctctcttcccttctcccttgccctccctttctctctccaccccccacgtctgtcctcctttcttattctgtgagatgttttgtattatttcaccagcagcatagaacaggacctctgcttttgcacaccttttccccaggagcagaagagagtggggcctgccctctgccccatcattgcacctgcaggcttaggtcctcacttctgtctcctgtcttcagagcaaaagacttgagccatccaaagaaacactaagctctctgggcctgggttccagggaaggctaagcatggcctggactgactgcagccccctatagtcatggggtccctgctgcaaaggacagtgggcaggaggccccaggctgagagccagatgcctccccaagactgtcattgcccctccgatgctgaggccacccactgacccaactgatcctgctccagcagcacacctcagccccactgacacccagtgtccttccatcttcacactggtttgccaggccaatgttgctgatggccccctgcactggccgctggacggcactctcccagcttggaagtaggcagggttccctccaggtgggcccccacctcactgaagaggagcaagtctcaagagaaggaggggggattggtggttggaggaagcagcacacccaattctgcccctaggactcggggtctgagtcctggggtcaggccagggagagctcggggcaggccttccgccagcactcccactgcccccctgcccagtagcagccgcccacattgtgtcagcatccagggccagggcctggcctcacatccccctgctcctttctctagctggctccacgggagttcaggccccactccccctgaagctgcccctccagcacacacacataagcactgaaatcactttacctgcaggctccatgcacctcccttccctccctgaggcaggtgagaacccagagagaggggcctgcaggtgagcaggcagggctgggccaggtctccggggaggcaggggtcctgcaggtcctggtgggtcagcccagcacctgctcccagtgggagcttcccgggataaactgagcctgttcattctgatgtccatttgtcccaatagctctactgccctccccttcccctttactcagcccagctggccacctagaagtctccctgcacagcctctagtgtccggggaccttgtgggaccagtcccacaccgctggtccctgccctcccctgctcccaggttgaggtgcgctcacctcagagcagggccaaagcacagctgggcatgccatgtctgagcggcgcagagccctccaggcctgcaggggcaaggggctggctggagtctcagagcacagaggtaggagaactggggttcaagcccaggcttcctgggtcctgcctggtcctccctcccaaggagccattctgtgtgtgactctgggtggaagtgcccagcccctgcccctacgggcgctgcagcctcccttccatgccccaggatcactctctgctggcaggattcttcccgctccccacctacccagctgatgggggttggggtgcttcctttcaggccaaggctatgaagggacagctgctgggacccacctccccctccccggccacatgccgcgtccctgccccgacccgggtctggtgctgaggatacagctcttctcagtgtctgaacaatctccaaaattgaaatgtatatttttgctaggagccccagcttcctgtgtttttaatataaatagtgtacacagactgacgaaactttaaataaatgggaattaaatatttaa

SEQ ID NO: 228 - DNA, 2373 bp, Homo sapiens
aatgtattatgatgtaggggagggaggaaggagggccagggtagggggcacaccctctccctgaatgaaattcatttaggggcactgtctgctcgcatgttctgttctgggagaaaatgggtagcagaagctacaatttgtactaagctaatgaaaagagagaaaagaagaatggggaagagaagggcaaagaaggcaaaaagagaagagaagaaaaagggaggagagagaaggagaaatgagaaaagaggaaaccaaatgaagaggatgtgtgagagaaaaaaatatgaaacagacctagaggatcaagacataatgggagcatttttagacaagccaaagatggaaaagcataatgcccaggggcagggtaatgggttgcgatatgggctaagcagcatgcaaggctggcgtgttgaaatggaggatgcacatacggctgtgatcggtttgccaagtggacttgaatcgtggtcattctttgctgtgtatgatgggcatgctggttctcaggttgccaaatactgctgtgagcatttgttagatcacatcaccaataaccaggattttaaagggtctgcaggagcaccttctgtggaaaatgtaaagaatggaatcagaacaggttttctggagattgatgaacacatgagagttatgtcagagaagaaacatggtgcagatagaagtgggtcaacagctgtaggtgtcttaatttctccccaacatacttatttcattaactgtggagactcaagaggtttactttgtaggaacaggaaagttcatttcttcacacaagatcacaaaccaagtaatccgctggagaaagaacgaattcagaatgcaggtggctctgtaatgattcagcgtgtgaatggctctctggctgtatcgagggcccttggggattttgattacaaatgtgtccatggaaaaggtcctactgagcagcttgtctcaccagagcctgaagtccatgatattgaaagatctgaagaagatgatcagttcattatccttgcatgtgatggtatctgggatgttatgggaaatgaagagctctgtgattttgtaagatccagacttgaagtcactgatgaccttgagaaagtttgcaatgaagtagtcgacacctgtttgtataagggaagtcgagacaacatgagtgtgattttgatctgttttccaaatgcacccaaagtatcgccagaagcagtgaagaaggaggcagagttggacaagtacctggaatgcagagtagaagaaatcataaagaagcagggggaaggcgtccccgacttagtccatgtgatgcgcacattagcgagtgagaacatccccagcctcccaccagggggtgaattggcaagcaagaggaatgttattgaagccgtttacaatagactgaatccttacaaaaatgacgacactgactctacatcaacagatgatatgtggtaaaactgctcatctagccatggagtttaccttcacctccaaaggagagtacagctcaactttgttgaaacttttaacatccatcctcaactttaaggaaggggatatgacatgggtgagaatgattacatcagagaacttcagcagtacaacagctagcccagaactgatttttttttttttttttgtaaatttgagacttatgtaagcgtgatttcaaaccataattcgtgttgtaaatcagactccagcaatttttgttgtatgattttgtttttttgtaaagtgtaattgtccttgtacaaaatgctcatatttaattatgaactgctttaaatcactatcaaagttacaagaaatgtttggcttattgtgtgatgcaacagatatatagccctttcaagtcatgttgtgtttggacttggggttggaacagggagagcagcagccatgtcagctacacgctcaaatgtgcagatgattatggaaaataacctcaaaatcttacaaagctgaacatccaaggagttattgaaaactatcttaaatgttcttggtaggggagttggcattgttgataaagccagtcccttcatttaactgtctttcaggatgttccttcgttgtttccatgagtattgcaggtaataatacagtgtattcataagaatctcaatcttggggctaaatgccttgtttctttgcacctcttttcaagtccttacatttaattactaattgataagcagcagcttcctacatatagtaggaaactgccacatttttgctatcatgattggctgggcctgctgctgttcctagtaagatattctgaattccattttatcaataaagcttgatttaacaaacaagaaaaaaaaaaaaaaaaaaaaaaaaaaaaaaaaaaaaaaa

SEQ ID NO: 229 - DNA, 1762 bp, Homo sapiens
cggccgagggcggggcagggaggcagcatgctaaaccgggtgcgctcggccgtggcgcacctggtgagctccgggggcgctccgcctccgcgccccaaatccccggacctgcccaacgccgcctcggcgccgcccgccgccgctccagaagcgcccaggagccctcccgcgaaggctgggagcgggagcgcgacgcccgcgaaggctgttgaggctcgagcgagcttctccagaccgacctttctgcagctgagccccggggggctgcgacgcgccgatgaccacgcgggccgggctgtgcaaagccccccggacacgggccgccgcctgccctggagcacaggctacgccgaggtcatcaatgctggcaagagtcggcacaatgaggaccaggcttgctgtgaagtggtgtatgtggaaggtcggaggagtgttacaggagtacctagggagcctagccgaggccagggactctgcttctactactggggcctatttgatgggcatgcagggggcggagctgctgaaatggcctcacggctcctgcatcgccatatccgagagcagctaaaggacctggtagagatacttcaggacccttcgccaccacccctctgcctcccaaccactccggggaccccagattcctccgatccctctcacttgcttggccctcagtcctgctggtcttcacagaaggaagtgagccacgagagcctggtagtgggggccgttgagaatgccttccagctcatggatgagcagatggcccgggagcggcgtggccaccaagtggaggggggctgctgtgcactggttgtgatctacctgctaggcaaggtgtacgtggccaatgcaggcgatagcagggccatcattgtccggaatggtgaaatcattccaatgtcccgggagtttaccccggagactgagcgccagcgtcttcagctgcttggcttcctgaaaccagagctgctaggcagtgaattcacccaccttgagttcccccgcagagttctgcccaaggagctggggcagaggatgttgtaccgggaccagaacatgaccggctgggcctacaaaaagatcgagctggaggatctcaggtttcctctggtctgtggggagggcaaaaaggctcgggtgatggccaccattggggtgacccgaggcttgggagaccacagccttaaggtctgcagttccaccctgcccatcaagccctttctctcctgcttccctgaggtacgagtgtatgacctgacacaatatgagcactgcccagatgatgtgctagtcctgggaacagatggcctgtgggatgtcactactgactgtgaggtagctgccactgtggacagggtgctgtcggcctatgagcctaatgaccacagcaggtatacagctctggcccaagctctggtcctgggggcccggggtaccccccgagaccgtggctggcgtctccccaacaacaagctgggttccggggatgacatctctgtcttcgtcatccccctgggagggccaggcagttactcctgaggggctgaacaccatccctcccactagcctctccatacttactcctctcacagcccaaattctgaagttgtctccctgacccttctttagtggcaacttaactgaagaagggatgtccgctatatccaaaattacagctattggcaaataaacgagatggataaaggtgaaaaaaaaaaaaaaaaaaaaaaaaaaaaaaaaaaaaaaaaaaaaaaaa

SEQ ID NO: 230 - DNA, 3056 bp, Homo sapiens
ctccgcctccctcccggcgggctgtccccgcagtgctcccggacccggcgagccttcggggcgcgcgtcgctggtggtggttgaggctctagcgataataaatgatagaggatacaatgactttgctgtctctgctgggtcgcatcatgcgctacttcttgctgagacccgagacgcttttcctgctgtgcatcagcttggctctatggagttacttcttccacaccgacgaggtgaagaccatcgtgaagtccagccgggacgccgtgaagatggtgaagggcaaggtagccgagatcatgcagaacgatcgactcggggggcttgatgtgctcgaggccgagttttccaagacctgggagttcaagaaccacaacgtggcggtgtactccatccagggccggagagaccacatggaggaccgcttcgaagttctcacggatctggccaacaagacgcacccgtccatcttcgggatcttcgacgggcacgggggagagactgcagctgaatatgtaaaatctcgactcccagaggcccttaaacagcatcttcaggactacgagaaagacaaagaaaatagtgtattatcttaccagaccatccttgaacagcagattttgtcaattgaccgagaaatgctagaaaaattgactgtatcctatgatgaagcaggcacaacgtgtttgattgctctgctatcagataaagacctcactgtggccaacgtgggtgactcgcgcggggtcctgtgtgacaaagatgggaacgctattcctttgtctcatgatcacaagccttaccagttgaaggaaagaaagaggataaagagagcaggtggtttcatcagtttcaatggctcctggagggtccagggaatcctggccatgtctcggtccctgggggattatccgctgaaaaatctcaacgtggtcatcccagacccagacatcctgacctttgacctggacaagcttcagcctgagttcatgatcttggcatcagatggtctctgggatgctttcagcaatgaagaagcagttcgattcatcaaggagcgcttggatgaacctcactttggggccaagagcatagttttacagtcattttacagaggctgccctgacaatataacagtcatggtggtgaagttcagaaatagcagcaaaacagaagagcagtgaacccttcaggggtctcagctgccttagactaaaggactttcaacacactggtctcttttaatttagtgaaaagtgtgggagttgtaattaggatcatccaccccagacatggaatcccccctccctggtggtcttaggtctataatcagtgacgaacagagggtgcccttggccaatgtagttaagaaactggaaaatggtttcttcatgttttcccaactctttcatccagtgtccaaaatatataagtaaatagctgtagagtcacatatatgaagtgaatagcatatgtgtcatttagtctccctgaagattcttttcaagatcctgttcagggtcctccaggcatcagctgttgtgtcctctctttgtaacagtggacaggacagaccacccagtgctgcaggagacaggccactgcgtcacctgtgagtggtcaggggctgatgtggcaacaccctctgccaagagacagagctgtcctgagaatgctttgtccttctgagcccatgttttctgctcagtagcagcttggaagcagatttggaatggtttattattttggctgctcttggggactgcgagaagcagagagaatgagagaccagtggcaactgcctgcacagcagagataaccctcttcccttgcttcctttaatagttaaatagactttgtataccacctgaccagcctttgtgcatttatcctaatcatgcatgaccgttaaccttttgcttagtccttaccatatgtaataggcagctgttaaattcaccaacagataccctgatttttcatcttacgtgaccaagaaaccacgttaggggaaatgaaaaaagcaagccacaataccatgattccttccattttcaacagtagatgaaggaaatgatactgaatgagtcacagtgttccctggcaagtaagctgtttgcattgagaaaggagtgagctggtgaggttaccaccctgaattgagctccagctgccagtttttgtgtttttccttgcccctttccaagtggttttcaagtgtcaggcagtgttctgagaagcagcagcctataactgtatgtgtgttccttgaagccaggtgcagagttcccagctactgcagcttgggatttggtgggaaactactgggataagcttctccttgacaatggaaaggcagcagtcttcaacatttggttgcaaatctccatccacatcagggagctttccccaggcaaatacaaaccgccccgtggcctgcaggcctgcaggggaggcagcaaagggacctggcagttgcaacacagtaagtcaggaattcaagcgtgaacccatattgataagtgggccagaattatttaggggcctggcttgctgctctccatttcctgtatcgctaatttatcatttttccaaccttggtattttatattatttagagaaaatgctgggtcactctctttgcctaaggtgactcaaacagccaaacgaaacttccgttgcctcccagccctctgtatccacctggttttgttctttccctgtgagcatttgtggttatagcttcccatatgccacattcaccggccacctcctcgccgtggaaccctgccctctcccctcctgctgctgtagagttttcccaaagcagtgtccaggagagaatttgagagagtgaagaaattgccttgtagatgtggagggctgcaatctgtcttgatttctccaagcacttaactttctttgactgcactgataattgctaatgatttcccatgagatttgcttacttttgtgtactgtattttccagcattacagaaccttggttattgttttttagccatagaatcttctagtaaaaaatatctgccgcca

SEQ ID NO: 231 - DNA, 4786 bp, Homo sapiens
gctgcgtgacgcggcggcgcgcaagggacgtgcggagtgagtggcgctgcgggtggggccgtcggcggcgctggtgagagaacgccgagccgtcgccgcagcctccgccgccgagaagcccttgttcccgctgctgggaaggagagtctgtgccgacaagatggcggacggggagctgaacgtggacagcctcatcacccggctgctggaggtacgaggatgtcgtccaggaaagattgtgcagatgactgaagcagaagttcgaggcttatgtatcaagtctcgggagatctttctcagccagcctattcttttggaattggaagcaccgctgaaaatttgtggagatattcatggacaatatacagatttactgagattatttgaatatggaggtttcccaccagaagccaactatcttttcttaggagattatgtggacagaggaaagcagtctttggaaaccatttgtttgctattggcttataaaatcaaatatccagagaacttctttctcttaagaggaaaccatgagtgtgctagcatcaatcgcatttatggattctatgatgaatgcaaacgaagatttaatattaaattgtggaagaccttcactgattgttttaactgtctgcctatagcagccattgtggatgagaagatcttctgttgtcatggaggattgtcaccagacctgcaatctatggagcagattcggagaattatgagacctactgatgtccctgatacaggtttgctctgtgatttgctatggtctgatccagataaggatgtgcaaggctggggagaaaatgatcgtggtgtttcctttacttttggagctgatgtagtcagtaaatttctgaatcgtcatgatttagatttgatttgtcgagctcatcaggtggtggaagatggatatgaattttttgctaaacgacagttggtaaccttattttcagccccaaattactgtggcgagtttgataatgctggtggaatgatgagtgtggatgaaactttgatgtgttcatttcagatattgaaaccatctgaaaagaaagctaaataccagtatggtggactgaattctggacgtcctgtcactccacctcgaacagctaatccgccgaagaaaaggtgaagaaaggaattctgtaaagaaaccatcagatttgttaaggacatacttcataatatataagtgtgcactgtaaaaccatccagccatttgacaccctttatgatgtcacacctttaacttaaggagacgggtaaaggatcttaaatttttttctaatagaaagatgtgctacactgtattgtaataagtatactctgttatagtcaacaaagttaaatccaaattcaaaattatccattaaagttacatcttcatgtatcacaatttttaaagttgaaaagcatcccagttaaactagatgtgatagttaaaccagatgaaagcatgatgatccatctgtgtaatgtggttttagtgttgcttggttgtttaattattttgagcttgttttgtttttgtttgttttcactagaataatggcaaatacttctaatttttttccctaaacatttttaaaagtgaaatatgggaagagctttacagacattcaccaactattattttcccttgtttatctacttagatatctgtttaatcttactaagaaaactttcgcctcattacattaaaaaggaattttagagattgattgttttaaaaaaaaatacgcacattgtccaatccagtgattttaatcatacagtttgactgggcaaactttacagctgatagtgaatattttgctttatacaggaattgacactgatttggatttgtgcactctaatttttaacttattgatgctctattgtgcagtagcatttcatttaagataaggctcatatagtattacccaactagttggtaatgtgattatgtggtaccttggctttaggttttcattcgcacggaacaccttttggcatgcttaacttcctggtaacaccttcacctgcattggttttctttttcttttttctttctttttttttttttttttttttttgagttgttgtttgtttttagatccacagtacatgagaatccttttttgacaagccttggaaagctgacactgtctctttttcctccctctatacgaaggatgtatttaaatgaatgctggtcagtgggacattttgtcaactatgggtattgggtgcttaactgtctaatattgccatgtgaatgttgtatacgattgtaaggcttatgtcactaaagatttttattctgattttttcataatcaaaggtcatatgatactgtatagacaagctttgtagtgaagtatagtagcaataatttctgtacctgatcaagtttattgcagcctttcttttcctatttcttttttttaagggttagtattaacaaatggcaatgagtagaaaagttaacatgaagattttagaaggagagaacttacaggacacagatttgtgattctttgactgtgacactattggatgtgattctaaaagcttttattgagcattgtcaaatttgtaagcttcatagggatggacatcatatctataatgcccttctatatgtgctaccatagatgtgacatttttgaccttaatatcgtctttgaaaatgttaaattgagaaacctgttaacttacattttatgaattggcacattgtattacttactgcaagagatatttcattttcagcacagtgcaaaagttctttaaaatgcatatgtctttttttctaattccgttttgttttaaagcacattttaaatgtagttttctcatttagtaaaagttgtctaattgatatgaagcctgactgattttttttttccttacagtgagacatttaagcacacattttattcacatagatactatgtccttgacatattgaaatgattcttttctgaaagtattcatgatctgcatatgatgtattaggttaggtcacaaaggttttatctgaggtgatttaaataacttcctgattggagtgtgtaagctgagcgatttctaataaaattttagttgtacacttttagtagtcatagtgaagcaggtctagaaaataagcctttggcagggaaaaagggcaatgttgattaatctcagtattaaaccacattaatctgtatcccattgtctggcttttgtaaattcatccaggtcaagactaagtatgttggttaataggaatccttttttttttttttaaagactaaatgtgaaaaaataatcactacttaagctaattaatattggtcattaaatttaaaggatggaaatttatcatgtttaaaaattattcaagcactcttaaaaccacttaaacagcctccagtcataaaaatgtgttctttacaaatatttgcttggcaacacgacttgaaataaataaaactttgtttcttaggagaaaatgattctgtaattccagtgtcactaatttatattgttctttcctctgatttttttcaggttagtgatttttttgtatacaatttaatccaaatgttatgacattcagaaatcatgaaacacagtagatatctgttataatgtggtgtatcacatggattataaagcaaagttatggtcgatttctattcttgaaagaatcaactacagtgaatcctttgcatttgaagccttaacatgcattgctttaattttgcccagggacaaattttaataatcagcaagactggtttgtgcaaagcgttgagtcatcaggtatttagagcctagccagctacccagtatccatgctgccatatcccttcattgtaaaaagtacctaaacattcgtgaaatgattttttttagctgaaaaatgctggcaagaagaattttaaagcttaaaataggtggtaaatttgaagtatgagtgtgttcacgagaaacataggcttttcaaaaaaatttttattcaaggcaaagcaaggaacatcttgagatatgtctcaagaatataaagatgtattattttaagccaaggagctgaaatatatctcagtttataaattcaggtatattctttttgtctccatggcaaccataacttttgaaccaaaaaaaattgtttttacatctttatgctgaaaatgtgtttagattaggaatatggtcgggctgaatttgctgttgctccctaaccaaatccacctcttgttttccttgtgagtccatggctaaatcaaagctgcccctgagaagagacttaatccaagcctgattgtactagtggcatcacttagaagtaggctttccctcttcctagtagatctcaatgttttataattccttaaaacagctgaaaattgggacaacatactttacgcaatgaacagtagttaaataggaaataaactagttccatataagtatacacctagagttttaattacctttataatgtttcttaaaagtgaaacttagatacaattgtgattggatacttagatactaagtgaaacttagtgtaacaattttgatctgttaaattggattttacatgtacatttgaatgccagaatttctaaataaatcccctggttaggaaattttaaaagtcaaagcttgttttcttcaaccactaccttctacattggttgacttagaccgtaagctttttaagtttctcattgtaatttaccttctcatgcagattgctgatgttttattaaaccttatttttacaaaaatgaaaaaa

SEQ ID NO: 232 - DNA, 4613 bp, Homo sapiens
atgaagatggcggacgcgaagcagaagcggaacgagcagctgaaacgctggatcggctccgagacggacctcgagcctccggtggtgaagcgccagaagaccaaggtgaagttcgacgatggcgccgtcttcctggctgcttgctccagcggcgacacggacgaggtcctcaagctgctgcaccgcggcgccgacatcaattacgccaatgtggacggactcactgccctgcaccaggcttgcattgatgacaatgttgatatggtgaagtttctggtagaaaatggagcaaatattaatcaacctgataatgaaggctggataccactacatgcagcagcttcctgtggatatcttgatattgcagagtttttgattggtcaaggagcacatgtaggggctgtcaacagtgaaggagatacacctttagatattgcggaggaggaggcaatggaagagctacttcaaaatgaagttaatcggcaaggggttgatatagaagcagctcgaaaggaagaagaacggatcatgcttagagatgccaggcagtggctaaatagtggtcatataaatgatgtccggcatgcaaaatctggaggtacagcacttcacgttgcagctgctaaaggctatacggaagttttaaaacttttaatacaggcaggctatgatgttaatattaaagactatgatggctggacacctcttcatgctgcagctcattggggtaaagaagaagcatgtcgaattttagtggacaatctgtgtgatatggagatggtcaacaaagtgggccaaacagcctttgatgtagcagatgaagacattttaggatatttagaagagttgcaaaagaaacaaaatctgctccatagtgaaaaacgggacaagaaatctccactaattgaatcaacagcaaatatggacaataatcagtcacagaagacctttaaaaacaaagagacgttgattattgaaccagagaaaaatgcatcccgtattgaatctctggaacaagaaaaggttgatgaagaagaagaaggaaagaaggatgagtctagctgctctagtgaagaagatgaggaagatgactcggaatcagaagctgaaacagataagacaaaacccctggcttctgtaactaatgccaacacttctagtacacaagcagctcctgtagctgttacaacacctactgtgtcatcaggtcaagcaacacctacatcacctattaaaaagtttccaaccacagctacaaaaatttctcccaaagaagaagagagaaaagatgagtctcctgcaacttggaggttaggacttagaaagacgggcagctatggtgcacttgctgaaatcacagcatctaaagagggtcagaaagaaaaagatactgcaggtgttacacgttcagcttcaagtcccagactttcctcctctttggataataaagaaaaggagaaagatagtaaaggaactaggcttgcatatgttgcacctacaataccaagacgactagccagtacatctgacattgaagagaaagaaaacagagattcttcaagtttgcgaacaagtagttcatatacaaggagaaaatgggaagatgatcttaaaaaaaatagctcagttaatgaaggatcaacgtatcataaaagttgctcctttggtagaagacaagatgatttgattagttctagtgttccaagcaccacatcaacaccaacagttacctctgcagctgggcttcagaaaagcctgctttccagcacaagcactactacaaagattacaacgggttcttcctcagcaggcacacaaagcagtacctcaaatcgtttgtgggctgaggatagtactgagaaagaaaaggacagtgttcctacggcagtgaccattcctgttgctccaactgttgtaaatgctgcagcttctaccacaaccctgactacaactactgctggcactgtctcctccacaacagaggtcagggagagacgcagatcatacctcactcctgttagggatgaagagtctgaatcccaaagaaaagcaagatctagacaagcaagacaatctagaagatcaacacagggagtgacattaactgatcttcaagaagctgagaaaacaataggaagaagtcgttctacccgaaccagagaacaagaaaatgaagaaaaagaaaaagaggaaaaagagaaacaagataaagagaaacaagaagaaaagaaggagtcagaaacatctagagaagatgaatataaacaaaagtactccagaacgtatgatgagacttaccagcgttataggccagtatcaacttcaagttcaaccactccatcctcttcactttctactatgagcagttcactgtatgcttcaagtcaactaaacaggccaaatagtcttgtaggcataacttctgcttactccagaggaataacaaaagaaaatgaaagagagggagaaaaaagagaagaggagaaagaaggagaagataaatcacaacctaaatcaatcagagaacgacgacgaccaagagagaaaagaagatctacaggagtttcattttggacacaagatagtgatgaaaatgaacaagaacaacaatcagacacagaagagggatccaataagaaagaaactcagacggattccatttctagatatgaaaccagttctacatcagctggtgatcgatatgattccttgctgggtcgctctggatcatacagttacttagaagaaagaaaaccttacagcagcaggctagaaaaggatgactcaactgactttaaaaagctttatgaacaaattctagctgaaaatgaaaagctgaaggcacagctacatgatacaaatatggaactaacagatcttaaattacagttggaaaaggccacccagagacaagaaagatttgctgatagatcactgttggaaatggaaaaaagggaacgaagagctctagaaagaagaatatctgaaatggaagaagagctcaaaatgttaccagacctaaaagcagacaaccagaggctaaaggatgaaaatggggccttgatcagagttataagcaaactttccaaataaaaaaaaaaaagcagcaagtaatggaattgcacatattagtaacccagtggaccataattggcagtcactggaagtctgggaagaatccttggagactgtcattttcggatatcctgccaaatgccctcttatctagaatttttgtttcattttgtttaattttctggggtgtttttgttgttgttggtttgttttttgtttttttttttaatcaagaccattgtttcatgttaatgcagctgctgagaagatttttttttaatgactgagaaaacttgtttacagctccagcatataaggaaagtgttcaaggccagatatgcctcagatatttaaccagtaagccttagttgtacataaatacttttgtgtcaacaaaaactttcagctctcacagaagacagttactcaacattttttgatgtgccacagtttcgagtttttcgatatttaaattttttggcttttcatctaagtttgggtttgtattttttccttctaaactcttcatgtggcagagtcttctatgttttcacggctttttcattacagaaaagaacacttgctcttctgtgattattgtcatgtattaggctaatgctgtgttgtctcccacctggaactgaattgcttggtggaacatatgctttcactgtttgtgcaatatgcatttatttcttatatgaatgctttaaagtcatttgaggttagatcttttaattcctattttctgcttcattggtcactttttttttattgtagtataagatgttagattctgtaatcttcacattcattttagcaggtactgagtgatgctgtatatacaaataagtgtattgttttgatttttagaccaccacatggcatgcttgactatttcttatttcaaatgtctgctaatgcagagtaggctactccatgatagtgttaaaaaacaaaatttgctaacaatgtgatataaagactttaaaagttacacattatgtggagccctatctttacaaaagtttcctactgtaaagtgcttttattttcagttttcatttgatagtactcaaccataattaaagttgcataagataattgctttacatttcacatacctatatttatctgagtgctgtctaaaactgttgtgctagccaaagtaatgctatgaaatcatttgcagaattaacccgtgagttaatgttaaatgcactgttattgccatgtgaagaggcatcgactttgataccaccatcatgttcagaccattttatacatttcagtggcctttttttttttaaggaaaaaaaagcgcaaaaccaagtacatagtgacgatggcttttatttggacaaatagcttttatattttcattaaaccatgcaaaaaatactacatctttctggcacataactgtctccttaaccactggaacagttcagccatttgaataaattgtacattgtaaagcttatagtagctgattgtattattgattgtattgtatactatattaaatgtgaatttgt

SEQ ID NO: 233 - DNA, 2643 bp, Homo sapiens
gcttcagttaccagccggctacgtcgcgcctgcgctttgacccccagtttgcgccccaactccggtcgtgcggccgcccggggagggctctgcagttgcgcagcttgctccccggcccttttcccctccgctccccgccgcctcctgacgccgggcgtgacgtcaccacgcccggcggccgccattacagagagccgagctctggagcctcagcgagcggaggaggaggcgcagcggccgacggccgagtactgcggtgagagccagcgggccagcgccagcctcaacagccgccagaagtacacgaggaaccggcggcggcgtgtgcgtgtaggcccgtgtgcgggcggcggcgcgggagcagcgcggagcggcagccggctggggcgggtggcatcatggacgagaaggtgttcaccaaggagctggaccagtggatcgagcagctgaacgagtgcaagcagctgtccgagtcccaggtcaagagcctctgcgagaaggctaaagaaatcctgacaaaagaatccaacgtgcaagaggttcgatgtccagttactgtctgtggagatgtgcatgggcaatttcatgatctcatggaactgtttagaattggtggcaaatcaccagatacaaattacttgtttatgggagattatgttgacagaggatattattcagttgaaacagttacactgcttgtagctcttaaggttcgttaccgtgaacgcatcaccattcttcgagggaatcatgagagcagacagatcacacaagtttatggtttctatgatgaatgtttaagaaaatatggaaatgcaaatgtttggaaatattttacagatctttttgactatcttcctctcactgccttggtggatgggcagatcttctgtctacatggtggtctctcgccatctatagatacactggatcatatcagagcacttgatcgcctacaagaagttccccatgagggtccaatgtgtgacttgctgtggtcagatccagatgaccgtggtggttggggtatatctcctcgaggagctggttacacctttgggcaagatatttctgagacatttaatcatgccaatggcctcacgttggtgtctagagctcaccagctagtgatggagggatataactggtgccatgaccggaatgtagtaacgattttcagtgctccaaactattgttatcgttgtggtaaccaagctgcaatcatggaacttgacgatactctaaaatactctttcttgcagtttgacccagcacctcgtagaggcgagccacatgttactcgtcgtaccccagactacttcctgtaatgaaattttaaacttgtacagtattgccatgaaccatatatcgacctaatggaaatgggaagagcaacagtaactccaaagtgtcagaaaatagttaacattcaaaaaacttgttttcacatggaccaaaagatgtgccatataaaaatacaaagcctcttgtcatcaacagccgtgaccactttagaatgaaccagttcattgcatgctgaagcgacattgttggtcaagaaaccagtttctggcatagcgctatttgtagttacttttgctttctctgagagactgcagataataagatgtaaacattaacacctcgtgaatacaatttaacttccatttagctatagctttactcagcatgactgtagataaggatagcagcaaacaatcattggagcttaatgaacatttttaaaaataattaccaaggcctcccttctacttgtgagttttgaaattgttctttttattttcagggataccgtttaatttaattatatgatttgtctgcactcagtttattccctactcaaatctcagccccatgttgttctttgttattgtcagaacctggtgagttgttttgaacagaactgttttttccccttcctgtaagacgatgtgactgcacaagagcactgcagtgtttttcataataaacttgtgaactaagaactgagaaggtcaaattttaattgtatcaatgggcaagactggtgctgtttattaaaaaagttaaatcaattgagtaaattttagaatttgtagacttgtaggtaaaataaaaatcaagggcactacataacctctctggtaactccttgacattcttcagattaacttcaggatttatttgtatttcacatattacaatttgtcacattgttggtgtgcactttgtgggttcttcctgcatattaacttgtttgtaagaaaggaaatctgtgctgcttcagtaagacttaattgtaaaaccatataacttgagatttaagtctttgggttttgttttaataaaacagcatgttttcaggtagagcttaaactaaatgatgtgtttacttagtgcagtttctggttatgaatattatattgctatgtgtatattatatggactctttaaaatgattgacagattggcaaattcttaaatctttgtacattgttgagtcatatgttcttagagttaaatttgtctcagataagaaagtgttaaagcattagcctgtgtcaagttctttgagtgatactagtgaaaccaaatagaaaactattgttggatcatgatttagtcttatgtacattcacccga

SEQ ID NO: 234 - DNA, 1987 bp, Homo sapiens
ggaggggagagaaagagcgagagaaggggaaagacaagtcgggagaggccggtaggcgtgaggcgggcctgaagcggcagcgggcggccttcgtccggcgagagctaggccgaggacccgcgccgcgctccccggcacctcaccgcgtccttcaccgactcccgcggcgcgcggccgggcggggaagggcgggcgggggtctcctccaggctgcgcgctcggagccgcctgctgggcttgggcggggcgcggggcccgcggccgccctacccggctcagtcctccccctgtgggacctggcgacggcggcggagggagaggggagcggcgcccgggccggggccgggggcgggtggggaggggggagggcggcggccgggctggggctcgggatccgcatcgggatcgggccgccatggacgacaaggcgttcaccaaggagctggaccagtgggtcgagcagctgaacgagtgtaagcagctgaacgagaaccaagtgcggacgctgtgcgagaaggcaaaggaaattttaacaaaagaatcaaatgtgcaagaggttcgttgccctgttactgtctgtggagatgtgcatggtcaatttcatgatcttatggaactctttagaattggtggaaaatcaccggatacaaactacttattcatgggtgactatgtagacagaggatattattcagtggagactgtgactcttcttgtagcattaaaggtgcgttatccagaacgcattacaatattgagaggaaatcacgaaagccgacaaattacccaagtatatggcttttatgatgaatgtctgcgaaagtatgggaatgccaacgtttggaaatattttacagatctctttgattatcttccacttacagctttagtagatggacagatattctgcctccatggtggcctctctccatccatagacacactggatcatataagagccctggatcgtttacaggaagttccacatgagggcccaatgtgtgatctgttatggtcagatccagatgatcgtggtggatggggtatttcaccacgtggtgctggctacacatttggacaagacatttctgaaacctttaaccatgccaatggtctcacactggtttctcgtgcccaccagcttgtaatggagggatacaattggtgtcatgatcggaatgtggttaccattttcagtgcacccaattactgttatcgttgtgggaaccaggctgctatcatggaattagatgacactttaaaatattccttccttcaatttgacccagcgcctcgtcgtggtgagcctcatgttacacggcgcaccccagactacttcctataaatttctcctgggaaacctgcctttgtatgtggaagtatacctggctttttaaaatatatgtatttaaaaacaaaaagcaacagtaatctatgtgtttctgtaacaaattgggatctgtcttggcattaaaccacatcatggaccaaatgtgccatactaatgatgagcatttagcacaatttgagactgaaatttagtacactatgttctaggtcagtctaacagtttgcctgctgtatttatagtaaccattttcctttggactgttcaagcaaaaaaggtaactaactgcttcatctccttttgcgcttatttggaaattttagttatagtgtttaactggcatggattaatagagttggagttttatttttaagaaaaattcacaagctaacttccactaatccattatcctttattttattgaaatgtataattaacttaactgaagaaaaggttcttcttgggagtatgttgtcataacatttaaagagatttcccttcatttaaactaaattactgttttatgttgatctgcatatttctgtatatttgtcatgacagtgcttgcatcctatttggtgtactcagcaaataaacttttcattttaaacaaaaacattcaaaaaaaaaaaaaaaaaa

SEQ ID NO: 235 - DNA, 2357 bp, Homo sapiens
cctgtaaactggctcgggcgcccccacgcccgcccttccttcttctcccagcattgccccccccacgtttcagcacagcgctggccgcagtctgacaggaaagggacggagccaagatggcggcggccgacggcgacgactcgctgtaccccatcgcggtgctcatagacgaactccgcaatgaggacgttcagcttcgcctcaacagcatcaagaagctgtccaccatcgccttggcccttggggttgaaaggacccgaagtgagcttctgcctttccttacagataccatctatgatgaagatgaggtcctcctggccctggcagaacagctgggaaccttcactaccctggtgggaggcccagagtacgtgcactgcctgctgccaccgctggagtcgctggccacagtggaggagacagtggtgcgggacaaggcagtggagtccttacgggccatctcacacgagcactcgccctctgacctggaggcgcactttgtgccgctagtgaagcggctggcgggcggcgactggttcacctcccgcacctcggcctgcggcctcttctccgtctgctacccccgagtgtccagtgctgtgaaggcggaacttcgacagtacttccggaacctgtgctcagatgacacccccatggtgcggcgggccgcagcctccaagctgggggagtttgccaaggtgctggagctggacaacgtcaagagtgagatcatccccatgttctccaacctggcctctgacgagcaggactcggtgcggctgctggcggtggaggcgtgcgtgaacatcgcccagcttctgccccaggaggatctggaggccctggtgatgcccactctgcgccaggccgctgaagacaagtcctggcgcgtccgctacatggtggctgacaagttcacagagctccagaaagcagtggggcctgagatcaccaagacagacctggtccctgccttccagaacctgatgaaagactgtgaggccgaggtgagggccgcagcctcccacaaggtcaaagagttctgtgaaaacctctcagctgactgtcgggagaatgtgatcatgtcccagatcttgccctgcatcaaggagctggtgtccgatgccaaccaacatgtcaagtctgccctggcctcagtcatcatgggtctctctcccatcttgggcaaagacaacaccatcgagcacctcttgcccctcttcctggctcagctgaaggatgagtgccctgaggtacggctgaacatcatctctaacctggactgtgtgaacgaggtgattggcatccggcagctgtcccagtccctgctccctgccattgtggagctggctgaggacgccaagtggcgggtgcggctggccatcattgagtacatgcccctcctggctggacagctgggagtggagttctttgatgagaaacttaactccttgtgcatggcctggcttgtggatcatgtatatgccatccgcgaggcagccaccagcaacctgaagaagctagtggaaaagtttgggaaggagtgggcccatgccacaatcatccccaaggtcttggccatgtccggagaccccaactacctgcaccgcatgactacgctcttctgcatcaatgtgctgtctgaggtctgtgggcaggacatcaccaccaagcacatgctacccacggttctgcgcatggctggggacccggttgccaatgtccgcttcaatgtggccaagtctctgcagaagatagggcccatcctggacaacagcaccttgcagagtgaagtcaagcccatcctagagaagctgacccaggaccaggatgtggacgtcaaatactttgcccaggaggctctgactgttctgtctctcgcctgatgctggaagaggagcaaacactggcctctggtgtccaccctccaacccccacaagtccctctttggggagacactggggggcctttggctgtcactccctgtgcatggtctgaccccaggccccttcccccagcacggttcctcctctccccagcctgggaagatgtctcactgtccacctcccaacgggctaggggagcacggggttggacaggacagtgaccttgggaggaaggggctactccgcccacgtcagggagagatgtgagcatcccgggtcactggatcctgctgctgtaatgggaacccctcccccatttacttctccacctcccgtcctccccatcattggtttttttttgtgtgtcaactgtgccgtttttattttattccttttattttcccccttttcacagagaaataaaggtctagaagtaaaaaaaaaaaaaaaaaaaaaaaaaaaaaaaaaaa

SEQ ID NO: 236 - DNA, 2161 bp, Homo sapiens
ggccttcgtccctactgcctgggcgcggggcggggcctgggcgcggggcgggaggcggtgaccagcagcaggaggagaaagaacatggcgggcgcatcagagctcgggaccggcccaggagcagcgggtggagatggagatgattcgctatacccgatcgcggttttaatcgacgagctccgcaatgaagacgtgcagctccgactcaacagtattaagaagttatcaacaattgccctagcacttggagtagaaaggacccgaagtgaattgttgccatttcttacagatacaatttatgatgaagatgaggtactattagctcttgctgagcagctgggaaatttcactggcctagtgggaggtcctgactttgcccactgtctgctgcctcctttggaaaatctggcaactgtggaagagactgttgttcgtgacaaggctgtggagtccctgagacagatctcccaggagcatactcctgttgctctggaagcttattttgtacctctggtgaaacgcttagcaagtggggattggttcacctctcgcacatctgcatgtggtttgttcagcgtttgctatcccagggcatcaaatgctgttaaagcagaaatcagacagcaattccgttccttgtgctcagatgacacaccaatggtacgacgtgctgctgcttccaaattgggtgaatttgcaaaagttttggaattagacagtgtgaaaagtgaaattgttccactgttcactagtctagcttcagatgaacaggattcagtgcgcctccttgctgtggaagcttgtgtcagtattgcccagttattgtctcaggatgaccttgagactttggtgatgcctacacttcgacaagcagcagaagataaatcttggcgcgttcgctatatggtggctgacagattttcagagctccagaaagccatgggtcctaaaatcaccctaaatgacctcatccccgcctttcagaacctacttaaagactgtgaagctgaagtccgggcagctgctgcccacaaagtaaaagaacttggtgagaacttgcccattgaagatagagagaccataattatgaatcaaattctgccttatataaaggaattagtatccgataccaatcaacatgtcaaatcggctctagcttctgtaattatgggattgtctactattttgggcaaagaaaataccattgaacatcttctacctcttttcttagctcagttaaaggatgagtgtcctgacgttcgtttgaatatcatctccaatttggattgtgtaaatgaagtgattggaatccgtcagctctctcagtctctccttcctgccatagtggagctggcagaagatgccaaatggagggtccgcctggccatcattgagtatatgccgctgctggcaggccagctgggtgtggaattctttgatgaaaagctgaattctttatgtatggcttggctcgtggaccatgtatacgccatccgagaagctgccaccaacaacctcatgaaactagttcagaagtttggtacagagtgggcccaaaatactattgttcccaaagtgttagtaatggcaaatgatcctaattacttgcatagaatgaccactttattctgcattaatgcactgtctgaggcctgtggtcaggaaataactactaagcaaatgctgcccatcgtattaaaaatggcaggagaccaagtagcaaatgttcgcttcaatgtggccaaatctctacaaaagattggaccaattctagataccaatgctttacagggagaagtgaagccagtactacagaagttaggtcaagatgaagacatggatgtcaaatactttgcacaggaagctataagtgtggtggcacaaaggctgaggaagctagaatttcctgtgaaggacagtggagaacccagtgtccctcgggctgacaagaaccacttcccaagacccacagtgcctggagaggacatggggaagggaccagtgtatcagttgcgtggagatactagagacacacttgcccagctgggaattgcagagctagtgcatttctcccaaagcacagactaataccccagatttaaaaaaagaacataaaaaataaagtaccacacatattgcacttttaaaaaaaaaaaaaaaa

SEQ ID NO: 237 - DNA, 2385 bp, Homo sapiens
gcgccattttgaaagtggagtcgcctgcccctgccgctgccgccgccgccgtcgctgtcgtagtcgccgccgccgctgccggagaaagagcacgagcggggaagccccagagtgaaatctagcatcctgccggctggtctgcccgcccctccttccttttccccccggcccccgtcccctccccccgcaggtgccatccgccgccatccgccctctctacccccccatccccaggtgaggggggtgagttcaggaagcggagaccccgaggaacccagcagggtcaccatttgcagcgcaacatggcaggagctggaggagggaatgatattcagtggtgtttttctcaggtgaaaggagcagtagatgatgatgtagcagaagcagatataatttctacagtagaatttaatcattctggagaattactagcaacaggagataaaggtggtagagttgtcatctttcaacaggagcaggagaacaaaatccagtctcatagcagaggagaatataatgtttacagcaccttccagagccatgaaccagagtttgactacttgaaaagtttagaaatagaagaaaagatcaacaaaattaggtggttaccccagaaaaatgctgctcagtttttattgtctaccaatgataaaacaataaaattatggaaaatcagtgaaagggacaaaagaccagaagggtataacttgaaagaggaggatggaaggtatagagatcctactacagttactacactacgagtgccagtctttaggcctatggatctaatggttgaggccagtccacgaagaatatttgccaatgctcatacatatcacatcaactcaatttctattaatagtgattatgaaacatatttatctgcagatgatttgcggattaatctttggcatctggaaattacagacaggagttttaacattgtggatatcaagcctgccaatatggaagagctaacagaggtgattacagcagcagaatttcatccaaacagctgtaacacatttgtatacagcagcagtaaaggaactattcggctatgtgacatgagggcatctgccctctgtgatagacattctaaattgtttgaagaacctgaagatcccagtaacaggtcatttttttccgaaatcatctcctctatttcggatgtaaaattcagccatagtggtcgatatatgatgactagagactatttgtcagtcaaaatttgggacttaaatatggaaaacaggcctgtggaaacataccaggtgcatgaatacctcagaagtaaactctgttcactgtatgaaaatgactgcatatttgacaaatttgaatgttgttggaatggatctgacagtgttgtcatgactggatcttacaataatttcttcagaatgtttgacagaaacacaaagcgagacataaccctagaagcatcgcgggaaaacaataagcctcgcacagttctgaagcctcgcaaagtctgtgcaagtggcaagcgaaagaaagatgaaataagtgttgacagcctagacttcaataagaaaatccttcacacagcctggcaccccaaggaaaatatcattgccgtagctactacaaacaatctgtatatatttcaagacaaagtgaattagggttggcattcctagcagaagaacccacttcctgcttagttgagatagttgaatctagcattcgttcctataaaagagagaggtccattgtggcgcccctttccagtgtttgacagtgtgccattcgacaacacattgttatagctacatggagaaagctctgtggattcatcactgtggtgttctccatgtctgctagccatttaggtaagggtagggcacttttaatttaaatgacttcttgcaccatcttgcctaatggactagattggactgtatcaacattgatttactccactttttatgccttccattgtgatgacgtcaaacacagtgaaagccttcagtcatgctatgggatttaattgtgtatcctcattactgtatcatttgtggggtacaccccttccccctttttttaaattaaatacagctcattcttactgtggcttgtagcattcctcctcttctggcctcctggactgctccccttcatctcttacccttgccccctccacccggtcttggtggtggtatattaaaaaaagaaagaatgaaagcacacaaaatgagtcagtttggggtcagtggtataaagggggtatatgttgcaaacaaatgttttagtaacagttggctgtaatcactcctcgccgtgtctggcactgaaaataaggaaaaaaaacctactactgaataaaagtgacaaagaatggaaaaaaaaaaaaaaaaaaaaaaa

SEQ ID NO: 238 - DNA, 2020 bp, Homo sapiens
gcaagtccttcgtaaccactccaggacgctgccagggcctgagaagggacaaactccaattgctccagttcaaactggtcctggcctggtcaaacggaggagacagagcagtgattcacagcaggacgtggaattgggacactcacccaggacacactatggtgcttcagccaagtgaaaggcactatcgagattggaaccacagaaggagccaagggagaacccaagacagagaatagtggcccaataatgaagcatgaattatccagatgaaaacacctatggaaataaagctgacattatctctacggtagaattcaaccacacgggagaattactagcgacaggggacaaggggggtcgggttgtaatatttcaacgagagcaggagagtaaaaatcaggttcatcgtaggggtgaatacaatgtttacagcacattccagagccatgaacccgagttcgattacctgaagagtttagaaatagaagaaaaaatcaataaaataagatggctcccccagcagaatgcagcttactttcttctgtctactaatgataaaactgtgaagctgtggaaagtcagcgagcgtgataagaggccagaaggctacaatctgaaagatgaggagggccggctccgggatcctgccaccatcacaaccctgcgggtgcctgtcctgagacccatggacctgatggtggaggccaccccacgaagagtatttgccaacgcacacacatatcacatcaactccatatctgtcaacagcgactatgaaacctacatgtccgctgatgacctgaggattaacctatggaactttgaaataaccaatcaaagttttaatattgtggacattaagccagccaacatggaggagctcacggaggtgatcacagcagccgagttccacccccatcattgcaacaccttcgtgtacagcagcagcaaagggacaatccggctgtgtgacatgcgggcatctgccctgtgtgacaggcacaccaaattttttgaagagccggaagatccaagcaacagatcatttttctctgaaattatctcttcgatttcggatgtgaagttcagccacagtgggaggtatatcatgaccagggactacttgaccgtcaaagtctgggatctcaacatggaaaaccgccccatcgagacttaccaggttcatgactacctccgcagcaagctgtgttccctctatgaaaatgactgcatttttgataaatttgagtgtgtgtggaatgggtcagacagtgtcatcatgacaggctcctacaacaacttcttcaggatgttcgacagaaacaccaagcgtgatgtgacccttgaggcttcgagggaaaacagcaagccccgggctatcctcaaaccccgaaaagtgtgtgtggggggcaagcggagaaaagacgagatcagtgtcgacagtctggactttagcaaaaagatcttgcatacagcttggcatccttcagaaaatattatagcagtggcggctacaaataacctatatatattccaggacaaggttaactaggtggacaagttattacttaataatctcacatactgaatactagtcaaacaagtttttaaatgtttctttgggtcttcatttgatgcattgactttaatttccctatacaggaaatgattggaatagaattaaaaggagtccaacattcccagctccccagttctaagaaacttttgtcaaacccaataggtttgggacacttctgtttagaattgaaagctgccagctaacagtaattcttccatagttgacttgaacttctgatgcttttattgcccagttttctctggtgggtccagtgttttgttcctaggtgtctgctgcgataaaatgaggttgtctgtagtatttaaggagaaaagagataagttttttttaattaagcaattccatttgattgaaaaaaatcaacaaaaaataaacaccgtttactcttagacaaaaaaaaaaaaaaaaaaaaaaaaa

SEQ ID NO: 239 - DNA, 4438 bp, Homo sapiens
cggcttggtcggcgcagcgcagcgccgcgcgcgtcccctcgccgccgtcgccgcagccaggcgcaccggcaccaggccccgccgccgggcgcacggacgcagcgcgcacgggccggccgggatgcgcgcctgggccccggcccgcccgaacccgcggccgccgcccgcccaccgcgcgctcgcttgaccgcggcgcccgcccccggccgcccccgcccgtccccctgccgcgatgccctcccttcggggccccggcggcccgcgcccctgctaggctgcggcggcatggcccgcgcgcccggcgcgacctctgcggattgcatcggtgtgtggcggcggggcatgcccagagcaccgggcacggccttcaatgggcgaggacacggacacgcggaaaattaaccacagcttcctgcgggaccacagctatgtgactgaagctgacatcatctctaccgttgagttcaaccacacgggagagctgctggccacaggtgacaagggcggccgggtcgtcatcttccagcgggaaccagagagtaaaaatgcgccccacagccagggcgaatacgacgtgtacagcactttccagagccacgagccggagtttgactatctcaagagcctggagatagaggagaagatcaacaagatcaagtggctcccacagcagaacgccgcccactcactcctgtccaccaacgataaaactatcaaattatggaagattaccgaacgagataaaaggcccgaaggatacaacctgaaggatgaagaggggaaacttaaggacctgtccacggtgacgtcactgcaggtgccagtgctgaagcccatggatctgatggtggaggtgagccctcggaggatctttgccaatggccacacctaccacatcaactccatctccgtcaacagtgactgcgagacctacatgtcggcggatgacctgcgcatcaacctctggcacctggccatcaccgacaggagcttcaacatcgtggacatcaagccggccaacatggaggaccttacggaggtgatcacagcatctgagttccatccgcaccactgcaacctcttcgtctacagcagcagcaagggctccctgcggctctgcgacatgcgggcagctgccctgtgtgacaagcattccaagctctttgaagagcctgaggaccccagtaaccgctcattcttctcggaaatcatctcctccgtgtccgacgtgaagttcagccacagcggccgctacatgctcacccgggactaccttacagtcaaggtctgggacctgaacatggaggcaagacccatagagacctaccaggtccatgactaccttcggagcaagctctgttccctgtacgagaacgactgcattttcgacaagtttgaatgtgcctggaacgggagcgacagcgtcatcatgaccggggcctacaacaacttcttccgcatgttcgatcggaacaccaagcgggacgtgaccctggaggcctcgagggaaagcagcaagccccgggctgtgctcaagccacggcgcgtgtgcgtggggggcaagcgccggcgtgatgacatcagtgtggacagcttggacttcaccaagaagatcctgcacacggcctggcacccggctgagaacatcattgccatcgccgccaccaacaacctgtacatcttccaggacaaggtaaactctgacatgcactaggtatgtgcagttcccggcccctgccacccagcctcatgcaagtcatccccgacatgaccttcacgaccgcaatgcaaggaggggaagaaagtcacagcactgatgaggacagctgcagaggtggcagtgtgtggacacaggaagtttgggccccctccctgccccagctttcctaggccagaattgtgtttggcagtaattgtctgtttaaaaaaataaaaaggaaaggaagcgttcaccgccacaaatcataaaatggacatgactgtggagtcttacagttcagggttctttcattcacgtcccttcctgtctcggtctgcggtctttaccacatcaataggactttttatgcgtccgggttaatttttcactccagtgcgtcctgttgcagggaccggagctgatgggagctgcttctcccccatgcctcactggtcccagatcagggctccagggacagatgatgagtctcaaacgagccagccaggggttcttttggttataaatggggcaattcgccctgtctcagagctgatgacctcaccgttgttttttggatggtgaattcatgctgagaatttgcagatgcaagctcctctcctaggtcttctgaatgtcttgaaacatcccaggtcccaggtctggtgcggtttcccgagaggagcggagtggggtttgtcttctgtgtgcctgtgtcctcatctgattcacctgccatttgctgagcctctgctgtgtaccaggcgtggtgctcagccctagaggcagttgacttaccctctgcagccctccctgccgcctcacccttcagcattcactgggcaccttcccggagcggacactgactcccatgcacgattttttggaatcttcctcctgactgtgaggtgggtgttcattcatttcctccataaacaccaacttctcgaagcgtgccaggctctgggctggatgctggggataagcgggaacccttaggatcccctctgtccacgagaagaagctgaggctctgagcggatgcacaggtcacccatggcaggtgccgtgcagtggtgtcaggaacccgtccgggtcttcacacaaggttctctccagtccatctcgtgggcggctcatgttagagcgacattcaaatggaaggtttggaaaggaatgcctctgtcttgtgaagtaggacatggcagacttggcgacgacaagggtccaggagaactgagacgcaggatggaagacagagaagaccccccggagctcctcgctctgcttggtggcttcaggagtgtggccctccccaggactccacttcatcctgggcttgcaccctccttgagccaatgcactgaactgcctttgaaaggaaattgcatgttctgaccattttaggatacctttactttaaggaccacacagtcccagaggacacatccctcgggaactctgcccctctgacaatgagggccacagagaaggtggtgtttccatggtagatgctcctgttctggtgataccaaacctgcccacccctctgagtcgtctttgctcatggacttgcagcagagccacgtagtttggcattttgattcagaaagtggggagcagagacccagccaaatccaaactttttttttggttttgttttgttttgttttttacaagatataacataacccaggaaacagacccagctgaggttattctcagtggattacagtatacttttgtgtgtgtaaaagcacaaagtgcatgtgtactcacttctggccatataacatttacacagggaaatggatcattgatttttttttaatcaacgtgaatgaagaatgtttgtttatatatcactataaaatccagttgacctggacagtattatatgtacatatctattctaattaaatttaacaatcaaaggattggattacttttttcccccttgtaaagaggttcgagaatgtggtcaattgtatagatagcgtgttaaagccaaaacccagctctgagggccttacccattacttggatatttgctacgatccatctccctttgtgagtcaaatgttaagagaagaaacttgtatttgcagctagaggttactgtcacatcatagatttaacatttaccatcttcaaagtacaaatcttacatgtccttcaaaaggaggtcttaatacagttcctagttccttacttctgttttaaactttgggtaccaaaccaaaaagaagaaaaaagaaaggaaaagatcttctttgaagaaaagtatgtctctggatccctggaaaataatgatgtccaaagcaaattgtgaagatcaaatgtgtgttaagaaaaggtgtcgaggggagggacaaaaccagaaacggtggaaggaccagtgtaatagtcacagacttgcatcctggctctgcttacatttcctggtactctcgaatgtacgggcgttcacatagtcattgtgaagttgttggggtttttttggttttgtttttaatttagctcttctctgaggacgaagctgttggtggtggtggtggtgggggtggtggtgtgggatacatggtggtcaagttgtcagccctgatcagtttggactctgtaactcataggtgcattctttttttctttggtgtctcacaaattacccaattgttgaataaaactataaatatgttaataccagctttttccaataaaataacaaatgttacatcaaaaacga

SEQ ID NO: 240 - DNA, 6762 bp, Homo sapiens
ggcgcgctcgggcctccgctcttcacgcgccgcattcgtagcccgagagtccgcgccgcggggaggcttggaggcaagcgctgcccgcgagctgagccgccggaggaggagccgcgggcaacgaggtttctctgtcattcacagaaaaatgaatcatttaaacctttggaggactcagttatcacaatacttctctactaccaactaagatttatgatagtaaatttatgagagcaaatttccatgttatagaactgttgaagaactaaaagaggatattctttcatcaaaataattctgcagtatcataatattactaaataaaattaaaaagcacaattattaaattattaaatttgccacacatgtgcagcagctactgtatcctgatagtgaccaaacctcaaatataaatggtttcccttcatgggaaaagccattatatttggaagaaaccactgaacattgttattaaatatattttcagctaactgtcatttaggagaattttcatgaaacaagttctagaaagttccaagtcccaccagtaagtggatttgatattatggcagcaacttacagacttgtggttagtactgtgaaccactacagcagcgtggtgatagaccggcgttttgaacaagctatacattattgcactggaacctgccacaccttcacacatggaattgactgcattgtggtacaccatagtgtttgtgcagacctcttgcacatccctgtgtctcagttcaaagatgcagatctgaactctatgtttctaccccatgaaaatgggctttcttcggctgaaggagactatccccaacaggccttcacaggcatacccagggtcaagagaggatctacatttcagaatacctacaacttaaaggatattgcaggagaagcaatcagttttgccagtgggaaaataaaagaattttcctttgaaaaactcaaaaactctaaccatgcagcttacagaaagggaaggaaagttaagtctgactcatttaataggaggtcagttgatttggacttgctttgtggccattataacaacgatgggaacgccccatcctttggtttactgcggagttcctcagttgaggaaaaacctttgtctcatagaaactcactggatacgaacctgacttccatgtttcttcaaaacttttctgaagaagacttggttactcagattttggaaaaacataaaatagataatttttcttctgggacagacataaagatgtgcttggacatcttattgaaatgctccgaggatttaaaaaaatgcacagacatcataaaacaatgcataaagaaaaaatcagggagtagcatcagtgaaggaagtggtaatgatacaatttctagctctgaaactgtctatatgaatgtaatgaccaggttagcatcctatctgaaaaagttaccatttgaattcatgcagtctgggaataatgaggctctagatttaacagaactgatcagtaatatgcctagcttacaactgactcccttctccccagtgtttggcactgaacaaccccctaaatatgaagatgttgtccagctctcagcttctgactctggacgatttcaaactattgaattgcaaaatgacaagcctaattctaggaagatggacactgtacaatccattccaaacaactccacaaattccttatataacttagaggtaaatgatcctagaactctaaaagctgtccaggtccaatcacagtcattaaccatgaatcctttagaaaatgtttcttctgacgacttaatggaaactctttatattgaagaagagtcagatggaaagaaagcattagataaaggacaaaagacagagaatggacctagtcatgagttattaaaggtaaatgaacatagagcagaatttccagaacatgctactcatcttaaaaaatgccccaccccaatgcaaaatgaaattggtaagatatttgagaaatcatttgttaatctacctaaggaagactgtaaatcaaaagtttctaaatttgaagagggagaccagagagattttacaaattccagtagccaggaagagatagataaattgttaatggatttggaatctttttcacagaagatggagacctctctaagagagccacttgcgaagggtaaaaactctaattttttaaatagtcacagtcagttgaccggtcagacccttgtagatcttgagcctaaatctaaagtctcttcacccatagaaaaagtctcaccttcctgtctaacaaggattattgaaaccaatggacacaaaatagaggaagaggatcgagccctcttactgcgaatcctggaaagcattgaagactttgctcaagaactagttgaatgcaaatcaagcagagggagcctatcacaagaaaaggaaatgatgcaaattctacaggaaaccttgacaacttcctcccaggccaatttatcagtctgtagaagtcctgttggtgataaagccaaagatactacttcagcagttttgattcagcagactccagaggtgatcaagattcaaaataaaccagaaaagaaacctggaacaccactcccacctccagccacctctccaagtagtccccgacctctctccccggttccccatgtgaataatgttgtgaatgcgccattgtccataaacattccacggttctactttcctgaaggactcccagatacctgtagtaatcatgaacaaactctaagcagaattgaaactgctttcatggatattgaagaacagaaagcagacatttatgaaatggggaaaattgcaaaggtctgtggctgtcctctctattggaaagcccccatgttcagggctgcagggggagagaagacaggatttgtgacagcacagtcattcattgccatgtggagaaagttgctgaataaccatcatgatgatgcctctaaattcatctgtcttctagcaaagcccaactgcagctctctagaacaggaggatttcatccctctacttcaggatgtggtggatacccaccctggtctcacgttcctgaaagatgctccagaattccactcccgctacatcaccacggttattcagagaatattctacacagtcaacagatcttggagtggaaaaattacttcgacagagataagaaaaagcaactttttgcaaaccctagcacttttggaagaagaggaagatataaaccaaattacagattacttctcctatgaacatttctatgttatttattgtaaattctgggaactagatactgatcacgacctctacatcagccaggccgatctgtctcgatacaatgaccaggcttcatcaagcaggattattgaaaggatattctctggtgcagtaacaaggggaaaaacaatacagaaagagggaagaatgagctatgcagattttgtttggtttttgatctctgaagaagacaaaaggaatcctaccagcattgagtattggttccgctgcatggatgtggatggagacggtgtactctccatgtatgagctggagtacttctatgaggagcagtgtgaacggatggaagccatgggaattgagcccttgccattccatgatttactgtgccagatgcttgacctagtgaagccagctgttgatggcaaaataactctaagagatctgaagaggtgcagaatggctcacatcttctatgacactttctttaatctggagaaatacttagaccatgaacagagagatccctttgcggtccagaaggatgttgagaacgatgggcctgagccctcagactgggaccggtttgccgctgaggagtatgagacgcttgttgcagaggaatctgcccaagcacaattccaggaaggctttgaagattatgaaacagatgaacctgcctctccctctgaatttggaaacaaaagcaataaaatattaagtgcaagccttccagagaaatgtggaaagcttcaatcagtggatgaagaatagctgccggtgtctacaatgaaacgaagatgtgtattttaaatgtttctttcttgtgaagagatgttctcgtttgcatactgctttttaaagactttgatttctccaagtgtgtatcatctgcactaggaactttgtttttaagcaataggtctggatacacatttaacttaggaggctcctccaatttgcctcaaacctcttacggagcttctcctcagaagtggtaccatcgccttccaaagtcagcactctacactcttgaatgtaccaaggatctcttggcgacagtaccaagcacggttctctacacaggtgactgaagttgcctctgtgttggctggcatccctgagtcccctccgggctcctatggagcctagaagaaaccttcacttgcagaaaacttgagtcagaaaattctggaacttgaaaaagtagtaagggcctccagaattgacttagccctagtaataaaagcactgccaaaacatctcagagacttcttttatgtatactggagttcaaagatctttaacttacctggcttaatgtaatttcacagttacctgccaaactactagtcactttacatcctcaggtattgtaaccactgggccttccaactttgctggcaagctctggtaacctccctgactgtggatcttatataaaatctcaagataaaaaaacacttcttaaatgaagtatagaatttgactcatacttggaaaaagcccttttaacttttatcttttattcattgaactattgaatgatgtatttaatatccaaattagttgataactgttttcacttcctatcagaaggcctgcttgaagacataaaggaataatgatacattaaaattcttactagatagatatattccttcctcccaggagtattagactagctaatagtaaaggcctcaacgttattctttacttcatgttgaaaacaattactacagatatttcatccacctcagtatttatcaaggaaatggaaaatgatacagctataaaagaaagctgttatttactgtagttgtagatgtattcactacagaatcctacatttttcagcaggccacagtccagccaaatcctataatatccttgaaaagaaactattaaaaaggatagacatttctgatgtaagtaaaacccccaagcaacttaatatccatctgtcagtcatcaacttttcccctagattttttttttaactagttctgaaagtgtcaagaatagcttccctttccaccctacctaggttccctccttgctggcataaaggccaagcagtgaaatgaaccttgggttagagttatggtaggcaaaaagaaaaggagaatttaggaaataaatatgctataaacaaggtacagtacagtgagagttaacaatcctaggaatcctgcctgtcacaagctcccagttccctgtcattttatcttcatgattagaactgatcttccatttaactattacagaaagcagtaactattgcaactatctaatagttcacacaaaagaattaaaagcttaaaaataatttttaggaaacacaatattcaaaatctaaacacactgataaattattaagattaagattatttatgtgataaatgaaatctcctaccaatccatccagcctttaccagggaagaaaagcaattatttcatttcagatagaaatacaaaaaaaaaaaaaatacttttcttagaagccagatatggtttaaatgttttattatccataatgatctaaactaataagattcaccaaaaagtaaaaattcaattttacaatatacatttttttttttaactatttggctttacctttttaccttggttctccttactgaagtcctcttgctttcactttgatctggtttttgaagtctcttaattattggctgggcatggtgactcatgcctgtaatcccggcactttgggaggccaagggaggtgatcacttgagcccaggagtaaagaccagcctgggcaacatagtgagactccgtctctacaaaaaataaatttagctgggcatggtggtgcacatctgtagtcctaccaacttgggaggctgaggcaggagaatcgcttgagccccaggcttcgaggctgcagtgagctatgattacgacactgcactccagcctaggcgacagagcaagaccccattctcttacaaagtctctattataaaagtacatccatcaataccattccatttaaaatgggctattgtaatttacccacattatcacattttcaggaattataagaatgtgttttattgtactccttccttggagctgaatgcaaggaatgtgaattctgaggaattaaggtagaatatatttgactttctggtaaagatcatggttaagtataatcattactgccaaactggaattttcaagttattataatatcccaggccccttgataaaagctgagggttatcatgaccttaatgctaattcaatgagaaatgagtttaatagcataacattaccaaggtaatcaaactaataaaattccatatatcttccctgcatcttgtcactgtgtaccattcaaagtgtttataaaactctagattcatcaaatgagatttgctcagctttttgaaatgttaagatgtgtttggagaaggctgcatgactttgtttttcccttttagcaaaactaaataaagttgtcaaatattgaaaaaaaaaaaaaaaaa

SEQ ID NO: 241 - DNA, 2071 bp, Homo sapiens
agcgcgggccggaccgcgccccctcctcggtccccgcgccccgcgagtccgcgcagttcccgaggcgcgggccctgttccctgcgccgcgccccctcagcgggccgtgctcgcatcaccgaggtcggtccggggcggaccgaagcccccggggcggggcggggcgcgggcgtccgggggcgccgcgggcccagcccccgccatgccgcccggcaaagtgctgcagccggtcctgaagatgaaggtggacgagctgttcctgtactggctcagcgaggccagcacgcagcggatgctgcaggactgcctgcgccggatcaaggcgcccgggcgggaccagccgaccccgggggacggggagcagcccggggcctggcccacagccccgctcgccgccccccggcccagcgggctcgaacccccgggaacccccgggccgggccctgcgctgcccctgggcgccgcctccagccccaggaacgcgccccacgttcgaggcacccgtagatccgcagggacgagagtagttcagacacggaaagaagagcctctgcccccggccacgagccaaagcattccgaccttctacttccccagaggacgcccgcaggactccgtcaacgtggatgccgtcatcagcaagatcgagagcaccttcgcccggttcccccacgagagggccaccatggatgacatgggcctggtggccaaggcctgcggctgccccctctactggaaggggccgctcttctatggcgccggcggggagcgcacgggctccgtgtccgtccacaagttcgtcgccatgtggagaaaaatcctccagaactgccacgacgacgcggccaagttcgtccatctgctcatgagccccggctgcaactacctggtgcaggaggactttgtccccttcttgcaggacgtggtgaacacgcacccggggctgtcgttcctgaaggaggcgtccgagttccactcgcgctacatcaccacggtcatccagcggatcttctacgccgtgaaccggtcctggtccggcaggatcacctgcgccgagctgcggaggagctccttcctgcagaatgtggcgctgctggaggaggaggcggacatcaaccagctgaccgaattcttctcgtacgagcatttctacgtcatctactgcaagttctgggagctggacacggaccacgacctgctcatcgacgcggacgacctggcgcggcacaatgaccacgccctttctaccaagatgatagacaggatcttctcaggagcagtcacacgaggcagaaaagtgcagaaggaagggaagatcagctatgccgactttgtctggtttttgatctctgaggaagacaaaaaaacaccgaccagcatcgagtactggttccgctgcatggacctggacggggacggcgccctgtccatgttcgagctcgagtacttctacgaggagcagtgccgaaggctggacagcatggccatcgaggccctgcccttccaggactgcctctgccagatgctggacctggtcaagccgaggactgaagggaagatcacgctgcaggacctgaagcgctgcaagctggctaacgtcttcttcgacaccttcttcaacatcgagaagtacctcgaccacgagcagaaagagcagatctccctgctcagggacggtgacagcggcggccccgagctctcggactgggagaagtacgcggccgaggagtacgacatcctggtggccgaggagactgcgggagagccctgggaggacgggttcgaggccgagctcagccctgtggagcagaagctgagtgcgctgcgctccccgctggcccagaggcccttcttcgaggcgccctcaccgctgggcgccgtggacctgtacgagtacgcatgcggggacgaggacctggagccgctgtgacgccgcccgcgagaacgccgccgcggggccgctccccacgtgccaccaccgggccaccgcggctcgtgtaaaaactgttgtggaaaatgagtgcgtttgtacggaatgataaacttttatttattcacagaaaaaaaaaaaa

SEQ ID NO: 242 - DNA, 2666 bp, Homo sapiens
ggaggaaggaggaggtcaccgtccagctgtctctcccctgtccccacatgtcttctaagctgttggagccggccggcgctcacttgtcttcaggaagctcggagcctttggtggagccggggagaggaagggtgggtgcaagagtgaaaggcgagaggggactgcaagcatccgggtcggctcctggccggagcaagatggctgagggcgagcggcagccgccgccagattcttcagaggaggcccctccagccactcagaacttcatcattccaaaaaaggagatccacacagttccagacatgggcaaatggaagcgttctcaggcatacgctgactacatcggattcatccttaccctcaacgaaggtgtgaaggggaagaagctgaccttcgagtacagagtctccgaggccattgagaaactagtcgctcttctcaacacgctggacaggtggattgatgagactcctccagtggaccagccctctcggtttgggaataaggcatacaggacctggtatgccaaacttgatgaggaagcagaaaacttggtggccacagtggtccctacccatctggcagctgctgtgcctgaggtggctgtttacctaaaggagtcagtggggaactccacgcgcattgactacggcacagggcatgaggcagccttcgctgctttcctctgctgtctctgcaagattggggtgctccgggtggatgaccaaatagctattgtcttcaaggtgttcaatcggtaccttgaggttatgcggaaactccagaaaacatacaggatggagccagccggcagccagggagtgtggggtctggatgacttccagtttctgcccttcatctggggcagttcgcagctgatagaccacccatacctggagcccagacactttgtggatgagaaggccgtgaatgagaaccacaaggactacatgttcctggagtgtatcctgtttattaccgagatgaagactggcccatttgcagagcactccaaccagctgtggaacatcagcgccgtcccttcctggtccaaagtgaaccagggtctcatccgcatgtataaggccgagtgcctggagaagttccctgtgatccagcacttcaagttcgggagcctgctgcccatccatcctgtcacgtcgggctaggaggggccaagccgaagagccacccaggccacagttcctgtgcctgccttccccaccccagcagtggcccctccccatcccctccctctgttcgtcccgtttgatgagaggctgtttactggggtggggtggcgagatgggcttgagggggctcagagcataaggcttcagggcccaagttgggagaagtgaccaaagtgtagccagttttctgagttcccgtgtgctagactggccagaagagagggtctggggcctggtcactcggccactctctcctgtttctggcctcttctcccttcactcccgtccagtctggttttgagagcaggggctgttctgcagcaccgcagggaagggaggagagatacctgctgcttccattgcttttcccttcctggagtcgatgcctttctaagggttggagctgctccttgcaggggcgggtcagtttcccaggccatgccggggtggccatctatggtagggctggaagctgaggctggccgccagctgtgggctggggtggggtgggtggggtcgggtggtggagaggccttagctgtcctggctggtgcccctcccaggctccttttcaccctgccccctgggcctgaggccccctgtgtccaagcctccccctggctcttcagttctctagcccttggctctgctgggtttcctgactgtagccacatctctcccgctccctaagggtaacctagccaatggaagctgccctttgggtaggtgctgggctcctgggagggcccagatgatggggtgaggcatgtctttccagaactttccctggcagggaggggatggcagaaactcagggaggggcttggggcccattgtatctggagagcctggattcctcttggcagtcttaggcccggccacttctgctacctttgcgctgctgtgagcctcaccctgggcccctgggccctgcttctctgctcccctgggtgatgggtgggcccagaaggtggcagtcccacaccttgtcctcccacctccctgaactgtccattgcttttatagggtgaggtaagagacagcctcccaagcccaggctttggcactcagaatgggcccagtgggggctgggcaggcccattgagggccaccgccgaggtttctcctagggctgttcctgggcctggctcttacaggctcgtcccccaggcctgcccttctccactgccccctcctgtgtctgggtccacacacccttcaggaagggggagcactgagaagcacagcacaggggctcagcctgggatccggtgatggtctgggcagaggctgggtcaggagtcccaaaggtcagtgacagtttctcagaagaggcccagcgtccacctctctcccagggccagacagcccttcctggctcccccatccccctatgggctcccagccccttgcaccctcattgctgttcagattaaagcctctgttttgcacctgtaaaaaaaaaaaaaaaaa

SEQ ID NO: 243 - DNA, 3145 bp, Homo sapiens
cgcagagggccggggctacggggcagcgccccgggcgatgaggggccggcgttgaccgggaagagcgggcaccgcggcagtggctccgaggggacccgcgatggcagcgccctgagaggaggctccaggcagggcgggctgcgctggcagcggccgctgaggtgctggccggccggctggctggcgacgggggcagaagcgacgagaggcgcgctcggcacccgcacccccgtgcccccgcctcagttgtctaaacttcgggctctcttccacccgctctgcgcgcccagagtcaacaacttcttcacccccctccgcccccgcccttccctccgtcagccccgggagctcgccgcgcgccggggaccaggaacctccagcgctgagatgtggccgtgaggcgttggcgggcggcgaggagaagctcggcggcgtcccggggccggagggccgtggggccggggcgcaggggcgcgagcaccccgcgcctctcccccgcctcctcctgccgtctccgccgctgcccgtgccttgcaagcagcagccggagctgccaagcgtcagggccgcggagatgtcgtcgtcgtcgccgccggcgggggctgccagcgccgccatctcggcctcggagaaagtggacggcttcacccggaaatcggtccgcaaggcgcagaggcagaagcgctcccagggctcgtcgcagtttcgcagccagggcagccaggcagagctgcacccgctgccccagctcaaagatgccacttcaaatgaacaacaagagcttttctgtcagaagttgcagcagtgttgtatactgtttgatttcatggactctgtttcagacttgaagagcaaagaaattaaaagagcaacactgaatgaactggttgagtatgtttcaactaatcgtggtgtaattgttgaatcagcgtattctgatatagtaaaaatgatcagtgctaacatcttccgtacacttcctccaagtgataatccagattttgatccagaagaggatgaacccacgcttgaggcctcttggcctcacatacagttggtatatgaattcttcttgagatttttggagagccctgatttccagcctagcattgcaaaacgatacattgatcagaaattcgtacaacagctcctggagctttttgatagtgaagatcccagagaacgtgacttcctgaagactgttctgcaccgaatttatgggaaatttcttggattaagagcattcatcagaaaacaaattaacaacattttcctcaggtttatatatgaaacagaacatttcaatggtgttgctgaacttcttgaaatattaggaagtattatcaatggctttgcattgccactgaaagcagaacataaacaatttctaatgaaggttcttattcctatgcatactgcaaaaggattagctttgtttcatgctcagctagcatattgtgttgtacagttcctggagaaagatacaacactaacagagccagtgatcagaggactgctgaaattttggccaaaaacctgcagtcagaaagaggtgatgtttttaggagaaattgaagaaatcttagatgtcattgaaccaacacagttcaaaaaaattgaagagccacttttcaagcagatatccaagtgtgtatccagttctcattttcaggttgcagaaagggcattgtacttctggaataacgaatatattcttagtttgattgaggagaacattgataaaattctgccaattatgtttgccagtttgtacaaaatttccaaagaacactggaatccgaccattgtagcactggtatacaatgtgctgaaaaccctaatggaaatgaatggcaagcttttcgatgaccttactagctcatacaaagctgaaagacagagagagaaaaagaaggaattggaacgtgaagaattatggaaaaaattagaggagctaaagctaaagaaagctctagaaaaacagaatagtgcttacaacatgcacagtattctcagcaatacaagtgccgaataaaaaaaaagcctcccacctctgccggataggcagagttttgtatgcttttttgaaatatgtaaaaattacaaaacaaacctcatcagtataatataattaaaaggccaattttttctggcaactgtaaatggaaaaatatatggactaaacgtagccctgtgctgtatcatggccatagtatattgtaacctttgtctaatcattggatttattgtgtcacttctgaagtttcacagaaatgaatgaattttatcatctatgatatgagtgagataattatgggagtggtaagaattatgacttgaattcttctttgattgtgttgcacatagatatggtagtctgctctgtatatttttcccttttataatgtgcttttcacactgctgcaaaccttagttacatcctaggaaaaaatacttcctaaaataaaactaaggtatcatccttacccttctctttgtctcacccagaaatatgatggggggaattacctgccctaacccctccctcaataaatacattactgtactctggaatttaggcaaaaccttaaatctccaggctttttaaagcacaaaatataaataaaagctgggaaagtaaaccaaaattcttcagattgttcctcatgaatatcccccttcctctgcaattctccagagtggtaacagatgggtagaggcagctcaggtgaattacccagcttgcctctcaattcattcctcctcttcctctcaaaggctgaaggcagggcctttccagtcctcacaacctgtccttcacctagtccctcctgacccagggatggaggctttgagtcccacagtgtggtgatacagagcactagttgtcactgcctggctttatttaaaggaactgcagtaggcttcctctgtagagctctgaaaaggttgactatatagaggtcttgtatgtttttacttggtcaagtatttctcacatcttttgttatcagagtaccattccaatctcttaacttgcagttgtgtggaaaactgttttgtaatgaaagatcttcattgggggattgagcagcatttaataaagtctatgtttgtattttgccttaaaaaaaaaaaaaaaaaa

SEQ ID NO: 244 - DNA, 2710 bp, Homo sapiens
gggcggcgggtgccggtgcgcacggagccgagccggggctcccgttgcgctgcaccgcgttgggtcggagtcccaggacttcagcggagatccgcgcgctgcgacggccggtgcagagcccgccgagcgcccagtcccggcccggggctgagttgggggcatgctctagccgcccccccggagcccgggagagaacccaggagcgccgccgcccagccccagcgccccgagcggaaccgctgcgaaggggccctgaacggccgtcgccctccctacgggcagcccccgggggttggcgaccgaagtctaggttttcgagaaagccagggtgggaaccctaactggactcttcgggacccccaggaaggatctgaggcctgagccatcctcctttctaccctgtctgccccccaggactgggcagttgcaggaggccctgggggggggcccaggactgtggttgtgccccccccccaaaggccggacaggatgggaccaagttagtctgtccagtctcacccagcacctcccaggcccagagagaacccccggggctctgaaagcttgccctgccgcctgaccgccatggagacgaagctgccccctgcaagcacccccactagcccctcctcccccgggctgtcgcctgtgcccccacccgacaaggtggacggcttctcccgccgttccctccgcagagcccggccccgccgctcccacagctcctctcagttccgctatcagagcaaccagcaagagctcacaccgctgcccctgctcaaagatgtgccggcttccgagctgcacgagctgctgagccggaagctggcccagtgtggggtgatgtttgacttcttggactgtgtggccgacctcaaggggaaggaggtgaagcgggcagccctcaacgagctggtggagtgtgtggggagcacccggggtgtcctcatcgagcccgtctacccagacatcatccgcatgatctcagtgaatatcttccggactctgccgcccagtgagaaccctgaatttgaccctgaagaggatgagcccaatcttgagccttcgtggccacacctgcagctggtatatgagtttttcctgcgtttcttggagagcccagacttccagccctccgtggccaagagatatgtggatcaaaagtttgtcctgatgctcctggagctatttgatagtgaggatccccgggagcgtgagtacctcaagaccatcctgcaccgggtctatggcaagttcctgggtctccgggcctacatccgcaaacagtgcaaccacatcttcctccggttcatctatgaattcgagcacttcaatggtgtggctgagctgctggagatcctaggaagcatcatcaatggctttgcgctgcccctgaagacggagcacaagcagttcctggttcgcgtcctgatccccctgcactctgtcaagtcgctgtctgtcttccatgcccagctggcatactgtgtggtgcagttcctggagaaggatgccactctgacagagcacgtgatccgggggctgctcaaatactggccaaaaacctgcacccagaaggaggtgatgtttctgggggagatggaagagattcttgatgtcatcgagccctcccagtttgtgaagatccaggagcccctttttaagcaggtggctcgctgtgtttccagcccccatttccaggttgcagagcgggctctgtatttctggaacaatgagtatatcctaagcctcattgaggacaactgccacactgtgctgcctgctgtgtttgggaccctctaccaagtctccaaggagcactggaaccaaaccatcgtatcactgatctacaatgtgctcaagaccttcatggagatgaatgggaagctgtttgatgagctcacagcctcctacaagctggaaaagcagcaggagcagcagaaggcccaggagcgtcaggagttatggcaaggtctggaggagctgcggctacgccggctacaggggacccagggggccaaggaggcccccctccagcggcttacaccccaggtggccgccagtgggggtcagagctagacagcacctcagaaggggaaaagctaaacccagagctgtcagtccctctatcccttctcctgtccaggggcccagagagaaacacacctacccctggccttgccagagtggcttctgaggactccctgcccagcccagctttcactggggggagacgaggagaggcaatggtggtcttggcaacagaatgctcagcccctcgtggcaggacttgacaagggcaagcttgaccaggaagctgccatcagggatcttcccctgccccgcaaagctaggctccagctgcaggcgggctcccaccctctgctcctggccttgggcaagggcactcagcgcctcgcctgcccctgccttggccaatgcgaggtccttccttatccccaccatggggtccatggtctatttattctcgcccagctcaccctctacacagacactgtcctgggtgcacactcctcccttccctcgctgtgtacttccttgtcccctttttatttattgggcagggggagggggagggcacaggcaagaagagattcacagtgtcctggggtaagggggggttcacagtaatcatggtctactcctctttccgtggctgggggtagacttaataaagagagaaattcaa

SEQ ID NO: 245 - DNA, 4167 bp, Homo sapiens
agttccctccagctgcagagagcttcagtttgtctttttttttttaaactaaaatggaggctggtttcttgccttaaggagcccattgcctttcccgctgaagtctagatgttgacatgtaataaagcgggcagcaggatggtggtggatgcggccaactccaatgggcctttccagcccgtggtccttctccatattcgagatgttcctcctgctgatcaagagaagctttttatccagaagttacgtcagtgttgcgtcctctttgactttgtttctgatccactaagtgacctaaagtggaaggaagtaaaacgagctgctttaagtgaaatggtagaatatatcacccataatcggaatgtgatcacagagcctatttacccagaagtagtccatatgtttgcagttaacatgtttcgaacattaccaccttcctccaatcctacgggagcggaatttgacccggaggaagatgaaccaacgttagaagcagcctggcctcatctacagcttgtttatgaatttttcttaagatttttagagtctccagatttccaacctaatatagcgaagaaatatattgatcagaagtttgtattgcagcttttagagctctttgacagtgaagatcctcgggagagagattttcttaaaaccacccttcacagaatctatgggaaattcctaggcttgagagcttacatcagaaaacagataaataatatattttataggtttatttatgaaacagagcatcataatggcatagcagagttactggaaatattgggaagtataattaatggatttgccttaccactaaaagaagagcacaagattttcttattgaaggtgttactacctttgcacaaagtgaaatctctgagtgtctaccatccccagctggcatactgtgtagtgcagtttttagaaaaggacagcaccctcacggaaccagtggtgatggcacttctcaaatactggccaaagactcacagtccaaaagaagtaatgttcttaaacgaattagaagagattttagatgtcattgaaccatcagaatttgtgaagatcatggaacccctcttccggcagttggccaaatgtgtctccagcccacacttccaggtggcagagcgagctctctattactggaataatgaatacatcatgagtttaatcagtgacaacgcagcgaagattctgcccatcatgtttccttccttgtaccgcaactcaaagacccattggaacaagacaatacatggcttgatatacaacgccctgaagctcttcatggagatgaaccaaaagctatttgatgactgtacacaacagttcaaagcagagaaactaaaagagaagctaaaaatgaaagaacgggaagaagcatgggttaaaatagaaaatctagccaaagccaatccccagtacacagtgtatagtcaagccagcaccatgagcattccggttgcaatggagacagatgggcctttatttgaagatgtgcagatgctgagaaagacagtgaaggacgaggctcatcaggcacagaaagatccgaagaaggaccgtcctcttgcacgccgcaagtccgagctgcctcaggacccccacaccaagaaagccttggaagctcactgcagggccgatgagctggcctcccaggacggccgctagcctccggggcgccgcgtcggggccgggcccgccagttcttttccggattctgtagaaaatacatacttcctgtgccataccaatcagttacactcaaagctttcttggaccccgttccgtaggcaataacgtgcgtccgcctcagcgcgagattaggagttcaaacaatggtgacttcccagagcccgctggcagagccgcgggttgacgacggtgtcctcgcagtgtcgccgccaccccagcgtagtccaagtcagactatttcacaaagtcagagcgataggaaagcaccctgcccttcatcttcatgttctcccaaatggaacttaggatcttttaacataggtggttctgtgataacatcagtgttttccaaatcaaaggaacgctttaaaaaataggacctattttttaagactttacagcctttgaaatggtttccacgtgattgttacgccagcagttctcgttttgtttgtttttcaatctcagtgaaatggctctttgctttcgagttctcacgcaacgtactgggcaaatgacaatcctcagccgctggtattttctaaggggtctcttcactttgatgagtgacatgaacaccgtgtctccttctcttgtgtgtacctaaagccatatttccaagtctgtggtactccaggattccaggagtaagcctgtagaagagatttattttaaaagagattgctctgaaatttatcttaaaagagcttgctctgtctaccttgacagaaattggagttttaaaattatgtgttaatatttttatttgcagatttcgtttccgtcaacttaaacattgttgcccttcaacaaggctcttgaattaataaaattatagtctctaagaattccacattttatggaaagttagagcaaaatcattttgagttaagccagttcttagcctaatgcaaactgcagcgcctttaagcataaagtaacacaacagcattgcacggggccggcactgccgctgccttcactgaaggctgcagtgctgttctgagagcttggaggaggcaccagcgaggatgacgtttagtggagctctttctgttgaaaagagctcacgttatcaacaccttgtaaggaaaatacagtgtctgagttttcatcggtcttcacatgctgctatatattccacagagttccttgcatgtactgagcttttgttttagatggaatagcacaaggagaaaaatctttaaacttagtgctttgtctattctttatttctctcagggtggccagtattttgacttatttatcctgcttgaaagctacttgagatgtgtactgctattctaaacacgtgatctagtttctttcatctctggcataagattatataacttaatgttaagtgtcttgaggcataaaagacaaaatgtggcttattttaggatctgttttttcatcgaggtctcgggtatcctttcaaagatagtgagaagcagacactgctccttgtgcagctctggtacctcctgcccactgctgtcacttcaagccactggcaatgcttctgtcctcgtgtcttggaggaaaatcacctggggggaggggacttcttgtggtaagagcaagtgcaggtatgaaatgcgaagattgccccagctaaaagtggacaagtccgctttgtgagatgaatacttcctgagaaacttgacaagtatctctccattttaccattatgaaaactatcattaaaaaaaacagtttagatgccttctccttttgagggaaaaagggtgctttttattgtataaagcagcgtcttatgtattttgatataccattgtttgaacttccgtctttagctgatagattctcaaatatccttgattttggatgttcagtatgtttgtgagagaggtttctgggaagactctctttttgccctcgggaaaaagcaaaatatcaatgtttgggtgactgtgtaaagctcagtgtgtaagaacatctttttgtctaggttttctttctgctctttattgaagacaaacactcaccaaaaagaaaaataaaagttttcagagaaactaattttctttggcaagagtattacttaatattttggcctcctaaagtttccctagttagtactcggactcctgtgctaattgtcagcttacatatcattgtatagagactgtttattctgtaccaaactgatttcaaaagtactacattgaaaataaaccggtgactgtttttcttcataaagttctgcgtttggcatcttcactctttccaaaatgtatctgtacatcagaaatgtcactattccaagtgtctttttagtgtggctttagtatggcttccttttaatattgtacatacattgtatctttgttttatggtaataagtaataaaaatgtagacttcatattttgtacaaaatgtcctatgtacagaataaaaaagttcatagaaacagcaaaaaaaaaaaaaaaaaa

SEQ ID NO: 246 - DNA, 2975 bp, Homo sapiens
gagacgccgagcgggccgagtgcggccgagcaaagccggagccggagcggggccgcaggagacgggccgggtccggacgggccgagatgccctataaactgaaaaaggagaaggagccccccaaggttgccaaatgcacagccaagcctagcagctcgggcaaggatggtggaggcgagaacactgaggaggcccagccgcagccccagccccagccccagccccaagcccagtctcagccaccgtcatccaacaagcgtcccagcaatagcacgccgccccccacgcagctcagcaaaatcaagtactcaggggggccccagattgtcaagaaggagcgacggcaaagctcctcccgcttcaacctcagcaagaatcgggagctgcagaagcttcctgccctgaaagattcgccaacccaggagcgggaggagctgtttatccagaagctacgccagtgctgtgtcctctttgacttcgtgtcagacccactcagtgacctcaaattcaaggaggtgaagcgggcaggactcaacgagatggtggagtacatcacccatagccgtgatgttgtcactgaggccatttaccctgaggctgtcaccatgttttcagtgaacctcttccggacgctgccaccttcatcgaatcccacaggggctgagtttgacccagaggaagatgagcccaccctggaagctgcttggccacatctccagctcgtgtatgagttcttcttacgtttccttgagtctcctgatttccagccaaacatagccaagaagtacatcgaccagaagtttgtacttgctctcctagacctatttgacagtgaggatcctcgagagcgggacttcctcaagaccattttgcatcgcatctatggcaagtttttggggctccgggcttatatccgtaggcagatcaaccacatcttctacaggttcatctacgagacggagcatcacaacgggattgctgagctcctggagatcctgggcagcatcatcaatggctttgccctgccccttaaagaagagcacaagatgttcctcatccgtgtcctacttccccttcacaaggtcaagtccctgagtgtctaccaccctcagctggcatactgtgtggtacaattcctggagaaggagagcagtctgactgagccggtaattgtgggacttctcaagttttggcccaagacccacagccccaaggaggtgatgttcttgaatgagctggaggagattctggacgtcattgaaccttctgagttcagcaaagtgatggaacccctcttccgccagctggccaagtgtgtctctagcccccatttccaggtggcagagcgtgctctctattactggaacaatgagtacatcatgagcctgataagtgacaatgctgcccgagtcctccccatcatgttccctgcactctacaggaactccaagagccactggaacaagacaatccatggactgatctataatgccctgaagttgtttatggaaatgaatcagaagctgtttgatgactgcacacaacaatacaaggcagagaagcagaagggccggttccgaatgaaggaaagggaagagatgtggcaaaaaatcgaggagctggcccggcttaatccccagtatcccatgttccgagcccctccaccactgccccctgtgtactcgatggagacagagacccccacagctgaggacatccagcttctgaagaggactgtggagactgaggctgttcagatgctaaaagacatcaagaaggagaaagtgctgctgcggaggaagtcggagctgccccaggacgtgtacaccatcaaggcactggaggcgcacaagcgggcggaagagttcctaactgccagccaggaggctctctgacccctcacgttcctaccacagggccacagcccacacagccctgggacactgccctggccctccatactctgctccctactggctgtcttgggggaaggcagcgcctctctagctactcaagggagggggatgtgggcacttgaagcagggacacccacagaatggtccctcttctccccaaaaggtgttcatgcctccctgtggctagtacaggctgagcactaagatgcttagtgctcagacaacctggggatgcctgtcccctacctgctcctcacccacagctacctgaggctgctctgagaagtacacacaggaatacatacgctcctctattcttcccttcatcctcatttgaacgccaggtatctcccctcctctctctcccctgcagaggcatgtagggaacagcaggagattattctcaccaaagttatgtcaagccccattggtcccagagtagctgaagggaagccaacccccctgcagcacaaataggccccccagtcccagccgtgtgctggcagatagggttgtattatttcttcttaccccatgcctgaccaagggaggtcaaaaggagaaaagtataggctgtggacaataactgatgaatatagggcccagatggaccaagtggggccggggagggatgaataaacaccctaccccgtgccctgtctttggtgagcagcagccctggggtcacagacatggaagggaccaccctggggctgactgcttttctgtgctgttggttcccaaaactagaaagaaggaagcagggagcggtgccccaagcatggctcctgccaacacctatttatttccttgtttgtgctatgctgggcaggccttctcttgtcccttataggtaccttggaggggccaggggctgaggaaggccggacccaggttccaggggcgcaggcagtgcggcttttggctgtgtacatagggtgctttattctccacagagtgatacatgctaaggtgggttgggcttggaccgatgtccccatatgtacagaactgaataaagtgggtctctgagaaaaaaaaaaaaaaaaaaaaaaaaaa

SEQ ID NO: 247 - DNA, 3366 bp, Homo sapiens
ggttgcgcgtgtgccatggactcagccgcccggtgatattgacaataggagagagaaaggggcattgactgggacccaccgcgggtagcgaaaggtggctctggcagcggcggctccagctcctgcggctcctcctccttattctgtccccttctcttgctgccgctgcagatccagtcttcctccctcccttccccccctccccacgtcgtcgccgccgccgccgggtccggggcaacgagctgaggcgccgcccgccaggaatgtgagcgaggagccaccggcggagccgcaacggggtcggtgccgatttgatgggacgggcccgcgggggaggatcgtgaggccgccgccgccaccggaacgctgaggttcgggtccggccgtgaggcctagaggctccgccgccgcggaaccggagggaccccgtaccggacagccgtcgccccaggctccccgcagctgcccggacctccccctgcacgtcccggtcccgccgcccgcccccgctgcggccacctcgcccgtctcccgcccctccaagccacagatcatctttggattcttccccagaagcttcaagtagggatatgtcctcagcaccaactactcctccatcagtggataaagtagacggattttctcggaagtccgtcagaaaagccagacagaagaggtcgcaaagttcctcacagtttaggtctcaaggcaagcctattgagttaacacctctgccgctgctaaaagacgttccatcctcagagcagcctgaactgttcctaaagaaacttcagcagtgctgtgtcatttttgacttcatggacacgctatctgatcttaaaatgaaagaatacaagcgctccactcttaatgaactggtggactacattacaataagcagaggctgtttgacagagcagacttaccctgaagtagttagaatggtatcttgcaatatattcagaactctccctcctagtgacagcaatgaatttgatccagaagaagatgaacctacccttgaggcatcgtggccacacttacagcttgtatatgaatttttcatacgatttttggaaagccaagaattccaacccagcattgccaaaaaatatatagatcagaaatttgtattacagcttctggagctatttgacagcgaagaccctcgggaacgggactacttaaaaacagtcttacacagaatttatggcaagtttcttggtcttagagcatttatccgaaaacagattaacaatatttttctaaggtttgtttatgaaacagaacacttcaatggtgtagctgaactgctggaaatattaggaagtattatcaatggctttgctttacctcttaaggcagaacacaaacagtttctggtgaaagtattgatccctttacacactgtcaggagcttatcactcttccatgcacagctggcatattgtatagtacagtttctggagaaagatccttcactcacagaaccagttattagggggttaatgaaattttggcctaaaacatgtagtcaaaaagaggtcatgttccttggggaactggaagaaatattggatgtgattgaaccttcacaatttgttaaaatccaagaacctttgtttaaacaaatcgccaagtgtgtatctagcccccattttcaggtggcagaaagagcactctattattggaataatgaatacatcatgagtttgatagaagaaaactctaacgtcatccttcccatcatgttttccagcctttataggatttcaaaagaacattggaatccggctattgtggcgttggtgtacaatgtgttgaaggcatttatggaaatgaacagcaccatgtttgacgagctgacagccacatacaagtcagatcgtcagcgtgagaaaaagaaagaaaaggagcgtgaagaattgtggaaaaaattggaggatctggagttaaagagaggtcttagacgtgatggaataattccaacttaacaaaaacaatgacaacaacattactaacctgtggagtcacacgtttatgtagtagaagatggagcaacagttttctgtattgtgcaactttacagtagatttcacctttgtttcattattacagcagcactgtatatacctgtctctaagtaaaggaaaaaacaaaataaggacttcaatccaaagtttggacagtagatggacttctcagaactttgcaaacataatcattgttctcaccctcttttaaaaaaaaaaatcggtcttcaaagatctgttgatgaaattgctatgttaaaattccattatcgggagttccttatttatcactagcagagagtatgatacaattttcaaatgtgaacaatcttaaatttagcttgtctttctgctaagctgttaaatgtatttatagtaaaggaagaaaaaaagactgtcatttccttataagtttgtgtaacatcctcctctggataacttgactgtaatttaacatctttttcttttgcacatcttcctgagttgaatgtccacgtggaatggggtcatgaattataaaagtccctgataaaagttttgtttactggggtgaacatctttccagtaaccaggtagtcctggtactcctttagttttaaaattaggagttaagagagaagaggtgataaacatagtagggaagggaatatcggattcatgcatcagtttatggtgaatccaaatcaatgtcttgaatcctttgaaaacaggcactgggacatcacaggcttcagtacctgaccagtattagttgcatatatcattgaacacacataccagagatgttttagaaatgtgagaaaaacatccttttggaccatttgaaataagaaagacaaacactaaacaatacaaccatgaaattgatcaccgggattgcaaatctaattgggaaaagagttgagcaaacagcttggactgtttggagttgttgccttactttttaatatgtatttataaagtattccagcaaaagaggatgtagcctctgggaaaaaacaaacatgttacagtgttttttgtagattctcgttctatatctcatcacagcgccagccctgtttttagccggaaaggattcaggataaacattattatgcattctgaattggatgcatattcctaactactgtatttgttaccaaaagtggttctacaaatgctactgaaaaaaatctggaaattcctaatgtcctgagtattaataataaagtttaaaaatgcttttatatcaaaggtgcatcgtgaccaaattgtttaagaaaaaaaaacaaaaaaaacaaaatctagggctgtattttatatatatatatatatatatatatatatatat

SEQ ID NO: 248 - DNA, 4424 bp, Homo sapiens
gcgcgcgtggggctccattccgcggtgctgggtctccgtgccggggtgggtgctcgtgtgtgcgcttctcctccccatcccccttcccccaagaataaaagaagaaccgggaggcgtgctcagaaaataaataaataaccaccacacacgcgcagcccggagcgagtcggcggggctggcggcagcggcggaggaggagtgaaggcggcggcggcggaggagggacgcgcggaaaaggcagcaactttaaagccagctcagagcctagacctccagccgagcggtttgcagcgcggcggcggcggcggcggcggcggcggcggcgttgagtgtctggcccgccggtccggtcggggtgtgcagtcggacggacgagcagcgcgtcgctgtcctccggcagctggagatgtccgagcccaaggcaattgatcccaagttgtcgacgaccgacagggtggtgaaagctgttccatttcctccaagtcaccggcttacagcaaaagaagtgtttgataatgatggaaaacctcgtgtggatatcttaaaggcgcatcttatgaaggagggaaggctggaagagagtgttgcattgagaataataacagagggtgcatcaattcttcgacaggaaaaaaatttgctggatattgatgcgccagtcactgtttgtggggacattcatggacaattctttgatttgatgaagctctttgaagtcgggggatctcctgccaacactcgctacctcttcttaggggactatgttgacagagggtacttcagtattgaatgtgtgctgtatttgtgggccttgaaaattctctaccccaaaacactgtttttacttcgtggaaatcatgaatgtagacatctaacagagtatttcacatttaaacaagaatgtaaaataaagtattcagaacgcgtatatgatgcctgtatggatgcctttgactgccttcccctggctgccctgatgaaccaacagttcctgtgtgtgcatggtggtttgtctccagagattaacactttagatgatatcagaaaattagaccgattcaaagaaccacctgcatatggacctatgtgtgatatcctgtggtcagaccccctggaagattttggaaatgagaagactcaggaacatttcactcacaacacagtcagggggtgttcatacttctacagttacccggctgtatgtgaattcttacagcacaataacttgttatctatactccgagcccacgaagcccaagatgcagggtaccgcatgtacaggaaaagccaaacaacaggcttcccttctctaattacaattttttcagcaccaaattacttagatgtatacaataacaaagctgcagtattgaagtatgagaacaatgttatgaatatcaggcaattcaactgttctcctcatccatactggcttccaaatttcatggatgtttttacttggtcccttccatttgttggggaaaaagtgactgagatgctggtaaatgtcctcaacatctgctcagatgatgaactagggtcagaagaagatggatttgatggtgcaacagctgcagcccggaaagaggtgataaggaacaagatccgagcaataggcaaaatggccagagtgttctcagtgctcagagaagagagtgagagtgtgctgacgctgaaaggcttgaccccaactggcatgctccccagcggagtactttctggagggaagcaaaccctgcaaagcgctactgttgaggctattgaggctgatgaagctatcaaaggattttcaccacaacataagatcactagcttcgaggaagccaagggcttagaccgaattaatgagaggatgccgcctcgcagagatgccatgccctctgacgccaaccttaactccatcaacaaggctctcacctcagagactaacggcacggacagcaatggcagtaatagcagcaatattcagtgaccacttcctgttcacttttttttttttttttttttttttttgagctgcggggcatgatggggattgctgcatatcagcagttggatgttcttgcctctgacagtagcttatttgctctgggggccaggaattggattcagtttacactatcattaaaaaagagggagagagataataaactatattttggtggggatggtgattaaacacctcttttgggtatgccttttaaaaatgcttatagagaaaaaaattttaaaaagaaagctaatgctagtatatactgcaatgttaggggaatgaacatgttttcctactgcattggggacttctagataggttaatgaaaggccttttattctgttactggacatgaaaactttgtctaatttcttactctattgtacgtttacagtcgcagcactaaaaatggatgacatcaaacatttttaacaaaatgatgtacaaactaaggactatttattgataatgttttgctactcttgtcagacaatggctataaactgaattaggcagtcttaaaaaaaaaaaaaaaacagaaaaagaaaaaaaagaacgttgcaaatttgttaaaatgccaaaaaggacagtttaattttgtacagattatgcttacctcaggtttctttagtgtgcttgaatgcccttctttccatataacacttatcttcttcttaattcggcaatggaatatcttttaagttttaaaaaaactggaataattatatctatcttttttgccgtttatatttaggggtttttgttgataaaatcaagtcttggttgtggcttgctgaattaaatatttatgagtggtgcatttttaagtatagtgaacaagacaccatattaagtacagtgataaagcatctatattctgtaaaaaaaaaaaaaatctgcctatgcatgttttttaagaaaaaaaaaatggctgtatcggcctgtatgggactgtaatgcgcttagtggtctgacatatactggaaatgtatgtatactggcgtactttatattctctaaaatgcttaatgcctttgaaattttgtaatcaaaaaaaagctttgaaaaaatctaaaggggagagtattctttaaagtttttaacataagcttgtcaatgcacatgtagatggttagcatgtttagcaaaccttgtgaaattataataagtttgtagttacatgtgaaactctaaatgcatggcaactgttaatgtcataacagtttagttattttgttctgttctgtcatgtgccacaaaatatgtacttttttcacttttttccctttgtatatcagttacgggttacaactggttcattctgaaaacaacaacaacaaaagtccattcatattttttaacaattgtataagtgcccaagtaattcactacagcctaaagccttgcctttgtaatttgacttctgacatgttggcaatcaaagcatgcacttgtaacaatgaaaaagaaaaagcattttatattactactcaataaaatgtgcatgaacttacagaattctcatccttccactgagtccgctgaagggatttatgtgcacaaccaccatgtgtcttctaggtgctggcccaccaccacacatcacaggctgatttccacaggcttcttcctaggggcctcgtgatctgaggggtggtgcctacttccactgtaagaaagaatcttggtggatttgtgtctcaaatcagataagagaagcctgtttaaagagcagatgccatcttctggcttcctcaaggagccagttaaaaaaccagagcattcctttttattgaaaaataaaattaatttgttatcaggttgtttcagttgtattggatgccctatctatctgctaaagcaaaaagtactaggctactaagtgcattttcatcacagaaaagagttgcatttgtattaacaagaaatttgtatacccacgcttcagctactatctaatcatcacccgaagatttaagatacaccaaatttcagtttgtttgtaacattgttcatctttagtgcactttgttttatataataaagtatgcctgttatattaaataataagaatatggcaattagcgatatagcatacccaaacaaagatgttctcgatacagtctggcaaagactatcccaaggttattttaatgaattcagacattttttcctgtggatatttctccatcctaaaaaaagtggcaaccaaggaaaatatttagatgcaacttactagagtgatgatgtgaaagaaatggtgattctggtatcatggtgtttattttctttcttataactgcagagaaaatatcctgactaaaaaaatttcatttttttggattcctttcttttacaaattgtgctgaggcaactatggcatagaaataaacatttgacattaaaataagtaaaaaaaaaaaaaaaaaaa

SEQ ID NO: 249 - DNA, 3079 bp, Homo sapiens
gggccctacagagggtccgccatgttccccggcggcgccgccgcttggctctggtagccgccgcccccgcccccaaccccgcccggcccagagcctagccgagccccgggcccagcatggccgccccggagccggcccgggctgcaccgcccccacccccgcccccgccgccccctcccggggctgaccgcgtcgtcaaagctgtccctttccccccaacacatcgcttgacatctgaagaagtatttgatttggatgggatacccagggttgatgttctgaagaaccacttggtgaaagaaggtcgagtagatgaagaaattgcgcttagaattatcaatgagggtgctgccatccttcggagagagaaaaccatgatagaagtagaagctccaatcacagtgtgtggtgacatccatggccaattttttgatctgatgaaactttttgaagtaggaggatcacctgctaatacacgatacctttttcttggcgattatgtggacagaggttattttagtatagagtgtgtcttatatttatgggttctgaagattctatacccaagcacattatttcttctgagaggcaaccatgaatgcagacaccttactgaatattttacctttaagcaggaatgtaaaattaagtattcggaaagagtctatgaagcttgtatggaagcttttgatagtttgcctcttgctgcacttttaaaccaacagtttctttgtgttcatggtggactttcaccagaaatacacacactggatgatattaggagattagatagattcaaagagccacctgcatttggaccaatgtgtgacttgttatggtccgatccttctgaagattttggaaatgaaaaatcacaggaacattttagtcacaatacagttcgaggatgttcttatttttataactatccagcagtgtgtgaatttttgcaaaacaataatttgttatcgattattagagctcatgaagctcaagatgcaggctatagaatgtacagaaaaagtcaaactacagggttcccttcattaataacaattttttcggcacctaattacttagatgtctacaataataaagctgctgtattaaagtatgaaaataatgtgatgaatattcgacagtttaactgttctccacatccttactggttgcctaattttatggatgtcttcacgtggtctttaccgtttgttggagaaaaagtgacagaaatgttggtaaatgttctgagtatttgctctgatgatgaactaatgactgaaggtgaagaccagtttgatggttcagctgcagcccggaaagaaatcataagaaacaaaattcgagcaattggcaagatggcaagagtcttctctgttctcagggaggagagtgaaagtgtgctgacactcaagggcctgactcccacagggatgttgcctagtggagtgttagctggaggacggcagaccctgcaaagtgccacagttgaggctattgaggctgaaaaagcaatacgaggattctctccaccacatagaatctgcagttttgaagaggcaaagggtttggataggatcaatgagagaatgccacctcggaaagatgctgtacagcaagatggtttcaattctctgaacaccgcacatgccactgagaaccacgggacgggcaaccatactgcccagtgacccactacttcccagggactctcacatctcgggccccaaatggacagatcacccgaggagctggaggggtcggccaagctgactgtaaatttcacagtctctctgaagaaaccattgtgcttctgagaccctagcccccttcctggatggaggcttgagggccctgggacatgtgctatctgataagattgggtcatcgctgccaaggtggagagcagtgagcaaggggcttggggcaatttccagtggagggcatccacacctccattttatgcttgtggttcacacatttaagtttacaaatcagatttcttttccccttcagtagaattagattttgtttttcaatcatgatttcaaatgcaatcctaagagctaatgtggacttttctttttccatgaaatgtctttaaaggatgaattagcatggtcttaaaatacatttctgaggttactagctgtattttgaattgtgagcaaaatgccgagaaacccagttggcatttatacaaaatgttgacctcaggtctatagttcttaaatgtggctaattctgtaacatagtcttggtattttttaattatgaatgcatatcctatttccaggcaggctctcttacttgaacacaaatccaaaaactaatttagagtcttttttgcccagatcttttaagacttacaccccagagatttaagaagaaaacctctaaatttcaaaattatgaagaattacagaattactcatttaaggtactttaaaagaagtttgtacattgtcaaagtaaattttaattcaaatcatgtctgtaaaacttgacgtattttgtgtatgcatgttttcattttgcaaatatttaatatatagacctatgatgtacaggtacgacatgtataggttacctagatgttatgagaaattttagtttattgtgagtactcaagttgcttagagagccaccagggtgatttgctgctggctttctatcatttttatgttttaatgcaaaggaaattttaaaatgttctggaagtgtttttgattaagcaatgcagcctagaagcaatggttctgttcaatcattcagatgttagtggaagcataaaagtcaagactgcatgttgaaacctttcttttgatagttactgaactgcttggttaaactaaatggaaccatgtgctaatttttcacaattattgacctgtattgattgccactgtagtttggtatttccctttactttggtggcctgcttccctcatgccctggaatacaactcagagctccaggcagcggaaccatctattgttttgtttgccagaaagtgcaccctgtatggtctcctgtctaagttggaaatattatgcatgtgcaggactattcgagtatt

SEQ ID NO: 250 - DNA, 2221 bp, Homo sapiens
cacgagggcccgggccgcgagcagccgcggctgtcccggtcgccacccttagcagcggtcgaggtcggtgccgaagcggtgttccccgccttagccgctggcgcctcccaagagagcggccggtgggccctcgtcctgtcagtggcgtcggaggccggcgctgcggtggccgcgcccttctggtgctcggacaccgctgaggagccggggccgggcacggctggctgacggctccgggcagctaaggctgcccgaggagaaggcggcggccgcggcgtaggcgcacgtccggcgggctcctggagcctggaggaggccgaggggaccatgtccgggaggcgcttccacctctccaccaccgaccgcgtcatcaaagctgtcccctttcctccaacccaacggcttactttcaaggaagtatttgagaatgggaaacctaaagttgatgttttaaaaaaccatttggtaaaggaaggacgactggaagaggaagtagccttaaagataatcaatgatggggctgccatcctgaggcaagagaagactatgatagaagtagatgctccaatcacagtatgtggtgatattcatggacaattctttgacctaatgaagttatttgaagttggaggatcacctagtaacacacgctacctctttctgggtgactatgtggacagaggctatttcagtatagagtgtgtgctgtatttatggagtttaaagattaatcatcccaaaacattgtttctgcttcggggaaatcatgaatgcaggcatcttacagactatttcaccttcaaacaggaatgtcgaatcaaatattcggaacaggtgtatgatgcctgtatggagacatttgactgtcttcctcttgctgccctcttaaaccagcagtttctctgtgtacatggaggaatgtcacctgaaattacttctttagatgacattaggaaattagacaggtttacggaacctcccgcctttggacctgtgtgtgacctgctttggtctgatccctcagaggattatggcaatgagaagaccttggagcactatacccacaacactgtccgagggtgctcttatttctacagttaccctgcagtttgtgaatttttgcagaacaataatttactatcaattatcagagcccatgaagcccaagatgctgggtatcgaatgtacaggaagagccaagccacaggctttccatcacttattacaattttctctgcccccaattacctagatgtctataacaataaagctgctgtgttgaaatatgaaaacaatgtcatgaatatcaggcagtttaactgttctccacacccctactggcttccaaactttatggatgttttcacatggtctttgccttttgttggggaaaaagtcacagagatgctggtaaatgtgctcaacatatgctctgatgacgaactgatttctgatgatgaagcagaaggaagcactacagttcgtaaggagatcatcaggaataagatcagagccattgggaagatggcacgggtcttttcaattcttcggcaagaaagtgagagtgtgctgactctcaagggcctgactcccacaggcacactccctctgggcgtcctctcaggaggcaagcagactatcgagacagccacagtagaagcggtagaggcccgggaagccatcagagggttctcgcttcagcacaagatccggagttttgaagaagcgcgaggtctggaccgaattaatgagcgaatgccaccccgaaaggatagcatacacgctggtgggccaatgaaatctgtaacctcagcacactcacatgctgcgcacaggagcgaccaagggaagaaagcccattcatgacttagagtcctgccgtggctcaggtggatctaaaactcaagaacaaattctatttatttattattggaaaatgaaaagcaactcaaaacaacttcaacctggaggtgcatttataattcagtctgcatttattctgtaaaaaggtgactgttttataaattcttttaatttatgttcaatatatataaaaagtgcatctgttttgtttttcccttttttctccataattttaagaaatgaatctgattgttgtcaacacatttgtgaagtcttgtgctataaaggggaacttcccctaataaaagggccttggaaacctcaaaaaaaaaaaaaaaaaaaaaaaaaaaaaaaaaaa

SEQ ID NO: 251 - DNA, 3111 bp, Homo sapiens
gcgggtcagcgcgagccgctgcagtgagtccgtcacggctccggcgcgagcgcgaggctgcagcccccgagtttcccggccgtcttcgccccctctccccctcctttcttcttctctgcctctcctgcctctcgccgctgctcctcccgcgctctccggctctgaatctcgaccttaatttatttccccctaccctgcccgctccctcgcgtgcccaatcgcccggccggcgcgggccccgcggcgccgcctcccctcccccacgcgcgccccctccccgccggcgacccgagggccgcagctgggccgccgccgccgtttcctgcgagccagcctgagcgcaacacttctccgagccagcgagccagcgagccgccgacccgccgagcaaaatgggaaatgaggcaagttatcctttggaaatgtgctcacactttgatgcggatgaaattaaaaggctaggaaagagatttaagaagcttgatttggacaattctggttctttgagtgtggaagagttcatgtctctgcctgagttacaacagaatcctttagtacagcgagtaatagatatattcgacacagatgggaatggagaagtagactttaaagaattcattgagggcgtctctcagttcagtgtcaaaggagataaggagcagaaattgaggtttgctttccgtatctatgacatggataaagatggctatatttccaatggggaactcttccaggtattgaagatgatggtggggaacaatctgaaagatacacagttacagcaaattgtagacaaaaccataataaatgcagataaggatggagatggaagaatatcctttgaagaattctgtgctgttgtaggtggcctagatatccacaaaaagatggtggtagatgtgtgactcttatcagagagtaccacccaacacttttgctttcttctccatctctgaagatctgctcaagacgtccagcaatgctctctgtgtatttaaatggaagtatttttctctgtgaagccacattttccaacatgagcctcatgaagccaactaagtgttattgaactgtaattctctcaataactcagtgtagcactttaaagtctgaaggacagcaacatgaaaagagcatatcaatgtggtggagaaagggaaggggttggctttttaatttatttttcttcatcttttataacaagaaagtatctatatatacatatgtaaatatttatatatagatatatgtagctttctatatatgtagtaggttggctttaatttaatatacttgattcagaaacaaaacaatagagtacaaaagtgccaagcagaacataaaacatccttacttttatttcacacagttttatatatagatagaagactgtacaatttgagccgggtgttaggccagctattttccttttcctgtgctttctcctttgagagattgacaaagcatttgttaacgtcctattatttaccttaattacatttttgtaacaaaggagtctgtaactttatttatacttatgaatatatccagggactacttctcattgctgagcagcttttaatacacctctgcttgaggagaaagtctagttcattgctactgccaagagctagttcttgtgttcatatagtaactgcacagggcttatagctgcttcattctgctactttgtaactaggagccattgcatttattaaatgtccctcagtaacgttaagtgctagttgtgattttatacataaaggccagaagctgtctgaggcaatcatgattgattgtatgtatcacttactgaagaatacctgaagtgatcatgtaactacttataagggatatccatttgtttgattacatgggtaaataatttgtcattaaacttgtgtttgaatcatgaattcccttgtttcaaaagacttgcagctaatctaaaaaactggtgatatttaatatgcatgtatgtatctaaacacccacatatatttgtggtttaagtgtgagaaatcttgctaatctatatgccacagaagagcaaaattgtatccaaatttatgccacttaaatttctttaccacgagggatagagcatgcatactggtttttttttcttgatttgcccatataattggtaatggataacttaataaatttgtgtgatataaaagtagtgtatcatgttctactgtttgatcttatcccttcccatttctgcaaaggtactgttagctggaagaaaaacattttggttagctttgtatgacagtagtctttccctttatagtttctctataaaaactggttttaaaatcagtggaaaagggcaggttgaatcaaggtgaatcaatctgaaattgagcacacctgcctgccatcgctgttccttcaactgagtgctgcacatcatgggctctgtctgtgagagaaaaatcccggtgcttggtgtccttgcatgacatggagttttgcatgtagatcaatttaaaatgtacctcttgtttacataatttgcataattttaaaagataatgttgccaaactttggaaatgttaatgttcagactgaaaatctccactacatgtaactttcttcctctggatcagtggcatggcttataatcccagccagtggtttgaactgttccagtgtcaactgccatgtgctctgcttcaagggggaactagccttttgtgaattttttgtacataagtatttgttacaaatattttagcaaatgctttctatttctcttgcttgtgcatatcttggctggcgttacagaaaaatagtgtaaacattatttccttaccggggaatgagggttttttctttttctttttttttttttttttttttagtttgtgtgtgggggtgggtaagggaggggatggtttatgttgaatgtttagtttttcttctgcatgatacgtcatgttgtgggatctttagaaaacttcatactgtatgaataagaaaataaaatatttgaaacttgaaaaaaaaaaaaaaaaaaaaaaaaaaaaaaaaaaaaaaaaaaaaaaaaaaaaaaaaaaaaaaaaaaaaaaaaaaaaaaaaaaaaaaaaaaaaaaaaaaaa

SEQ ID NO: 252 - DNA, 3401 bp, Homo sapiens
gggtacgagccccgcccgagctcaccgcccctgctcccctctccgaccctttgagccgtggccgttgccagatgtccacaatgggaaacgaggccagttacccggcggagatgtgctcccactttgacaatgatgaaattaaaaggctgggcaggaggtttaagaagttggacttggacaaatcagggtctctgagcgtggaggagttcatgtccctgccggagctgcgccacaacccgttggtgcggcgagtgatcgacgtcttcgacaccgacggtgatggagaagtggacttcaaggaattcatcctggggacctcccagttcagcgtcaagggcgacgaggagcagaagttgaggtttgcgttcagcatttacgacatggataaagatggctacatttccaacggggagctcttccaggtgctgaagatgatggtgggcaacaacctgacggactggcagctccagcagctggtcgacaaaaccatcatcatcctggacaaggatggcgatgggaagatatcctttgaggaattcagtgctgtggtcagagacctggagatccacaagaagctggtcctcatcgtatgagcctttttcttacaagcaccacccaacaacttctgctttcttccctatctctttcaagatttgctcaagacgtccaactgtctctctgacttatctggaagtatttctttttgtgaagccatatgtcctaacaggagcttcatcaccaactcagtgctattaattctccttctctgaatgactcagggtaccctatagggggaagagcaagtcaaatgagcatagtggggaaagaaaaggaaatggcttttataaacatcttttactttgttttgattcaaagaccaaactagaactttaaaagttcaaaaataagaaagtatacatttttgctgttatttctcatcattttgtatatgggaggaaatttataatttgcatgggtgttaggtgaactgttttcatttgcttgtgttcagatatcttgccagattgttaacttcctattgtagcaacagggacaaatatatttgtctttgctgggcatctcgtaatcacttttcttaggggacagaatcccatcttttccttcggcagattgcagccccattccccacaatgcatccagaaatcgctgtgcatgtttgaggggtaggagttcatttggcctcctcctgacttgttgctccagctcctgaacagaaactagcttcagggctcttataggaaatgctaagcctggactaagtgcccagctcagccatcatcctcattagcagtgggtttccagggttggcagcccacaccagcattaatttcaatgaaggggacctccagctaaatagggcaagcaaagtgttctcccagaaagtgctctcacctccgacactggtccctacccccaggtggagacaatgagacatttagttagttgtcctacggaggagaggcagtagagtcaggctgcagtggaatctccctaggatgccaaagtggcattatgtctgttgctcacagatgcagagactgacaattgtgtctccacagcagaggtggatgctagctacaccagctatgctgattttgaaaatcagatctgaggcctagaagagaaactgagagctctctcattccaggaagccttttccctagtggaacattcagtgcagaagtcctcacacactaacagatctccaccattgggtgagccggagcctgtggttccaggggagatccagaatgcatgtgtctcttcccacgcatttatgtcatgttggtagctttagatcagccatggtgagaaaagaacaaaagcttttagttgtttttgttttgttttggagaatttgtttaccagtaaatacatcactgcctgtaccccaaatgttaccagctccctgaggtgtcccacatactattgtgagttctcagagcatgaactgtcctcagaagagcagggctaggacttgtcccagcatctgtgcctccataccaatcctctttctcacagagaaccacttcccatataagatgcttaaggctctcaaaacagcagaacaatgaaacatactctccctacacttgcttagccaagagataccactcaggtaacttttttcaggacatggaagatctgtttcaaggagatttactgctattttatttggaagaagctggcaactggtcttgaccaaaatagaaaaaaaaaaaaaaagtccacaaatttaatcacttgtagggaacccatctatcaaggtaccctaccatatacttttgtatttaatagattacttagaaaccacaaaaataggaatccttaccccttcaattcctgttcaaccctaaaaactgtgataaacgctcccaaccctgtggtgatcagggttatgtaatgttcaaagattcagacacacctgggtttggattcagttgcaactgggttgttatcacactcacttctttttagctgtgtgagcatgaataatttacttagcctctctgtgtctttccacctaattaaagaggatccaccccagggttattttgaggattcaaaaaggcatgcaacacacctggagcacaattccactttcattcaactaattcccttcccttcccccttcttccccttctacaagatcaatatgtaaaggagacatgaggcttactggttgcttttgaacacttacttagttcttagctacacccactctaaaattaactggacattagtgtacagcccatgtccaagcccagagagaaaacaatgggaacaatttcaaggtcctcaccactccttcatttgcagaggggacaacagactttctgaccagagaactggagaatttttaaaacaaaatctctcattccagcccaacctatttaactttttgtggaggaattttacatggaggaagtgagcacatgtcatgctagccaagaggacattattgtcattaaagagaggcattatttatacaccctgcaatgtgcacattaaaatatggaaattttaaaattatgaccaagggcttgaaacatattggattacatgctcacatttaacaaagagaggaaatgtgtttcagtttctggagtggctggaatttacaagctaattgttcaataaatctactcaagatagttacctaaggctttgtggcaatgaccttgaactgagagcctgtatctggatttagcacttgaaagatctaactggatatttgggttaaaagaatcacatttattcccaaatcggaatgctttgtttttcctgtcagttaattgccagttgccaacaaatctagttctatacagtttcttgggatgatgataataaacatttattgagcaaaaaaaaaaaaaaaa

SEQ ID NO: 253 - DNA, 3293 bp, Homo sapiens
catgccagcctcgcgcagcctgcgctgacttccccgagacgcgccgcggtcggcacggagactttctgggctctggatggttcgtgcgctgctcaccctcgcccacccctgacgccgcggaccgcagctcctcagccccgcagccccgcagcccagcagccccgcagcggcgccgaggacagtgcagccgagttgcgtctccctcgcgcgagcagccattgtttgatgtcctgtgactgagaaaccaggctttaaactttatgcctttggagatggagcccaagatgagcaaactggcctttggctgtcagagaagttccacatcagatgatgactctggctgtgcattggaggagtacgcctgggtccccccgggcctgagaccagagcagatccagctctattttgcttgcttaccagaggaaaaagttccttacgttaacagccccggagagaagcatcggattaaacagcttttgtaccagttaccaccacatgataatgaggtacggtattgccagtctttgagtgaagaggagaaaaaagagttgcaggtgttcagtgctcagcggaagaaagaagcactgggaagaggaacaattaagcttctgtccagagcagtcatgcatgctgtgtgtgagcagtgtggtttgaagataaatggaggtgaagttgcagtgttcgcctcccgtgcgggccctggtgtgtgctggcacccatcctgttttgtctgtttcacgtgtaatgagctgctggtcgacctcatctatttttatcaggatggaaaaattcactgtggcaggcaccatgcagaactgctcaaaccacggtgctcagcatgtgacgagataatttttgctgatgaatgcacagaagctgagggtcgccattggcacatgaaacacttctgctgccttgagtgtgaaacggtcctgggaggacagaggtatatcatgaaggacggccgccccttctgctgtggctgttttgagtctctctatgcggagtactgtgaaacctgtggggaacatattggtgtggaccatgcacagatgacctatgacgggcagcactggcacgccacggaagcctgcttttcttgtgcccagtgtaaagcctctttgttgggatgtcccttccttcccaaacagggtcagatttactgctcaaaaacgtgcagtcttggtgaagacgtccatgcctctgattcttccgactctgcatttcagtcagctcgatcaagagactcccgaagaagtgtccgaatgggcaagagcagccggtcagcagatcagtgtagacagtctctcctcttatcgcctgctctgaactacaagtttcctggcctctcaggcaatgctgatgacaccctttctcgaaaattggatgatctgagtctctccagacaaggaacaagttttgccagtgaagaattttggaaaggcagagtagagcaggaaactccagaagaccctgaagaatgggctgatcatgaagattatatgacgcagctcctcctcaagtttggtgataaaagcctctttcagccacagcccaatgagatggatattcgagccagtgagcactggatatctgataacatggttaaaagtaagaccgagttaaagcaaaataaccagagccttgcaagtaaaaaataccagtctgatatgtactgggcacagtcacaagatggactgggcgattctgcttatggcagccacccaggccctgcaagcagtagaaggcttcaggaattggaactggaccatggggcttcagggtataatcatgatgaaacacagtggtatgaagattccctggagtgtctgtcagacctgaaaccagagcaaagtgttcgggattcgatggattctttggcattgtccaatatcacaggggcttcggtggatggagaaaacaagccaaggccatcattgtattctctgcaaaattttgaggagatggaaacagaagattgtgagaagatgagcaatatgggaactttgaactcttccatgctgcacaggagtgcagagtccttaaagagtctaagttcagagttgtgtccagagaaaatcctgcctgaagagaagccagtacatctgccagtgctcagaaggtccaagtctcaatccagaccccagcaggtcaagttctccgatgatgtcattgacaatgggaactatgacattgaaatccggcagcctccgatgagtgaaaggactcggagacgcgtctacaattttgaagagaggggatccaggtctcatcaccaccgccgccggagaagtagaaagtcccgctccgacaatgccctgaatcttgttacagaaagaaaatactctcccaaggacagactgcggctgtacacccccgataactatgagaaatttatacagaataaaagtgcccgggagatccaagcatacatccagaatgctgatctctacggacagtacgcccatgccactcccgattatggcctgcagaacccaggaatgaatcggtttctgggactctacggcgaggatgatgattcctggtgttcttcctcctcctcctcttccgactcggaagaagaaggatattttcttggacaaccaatccctcaaccccggccacagagatttgcctactatacagatgacctttctagtccaccatctgcacttcccacccctcagtttggtcagaggacaacaaaatccaagaagaaaaagggacacaagggcaaaaattgtattatttcttaaccaagtagtgatgcagagcatttgtttaaaacttagccattaaccgtctgaatcgtttccttttcttccgtaggaaagttgtgaaaatagtttaaagtgctttctttgcccatgtaaatgagaactcaactgctgtttacagtgtcagattaacatttgaaaggtgtgatttctccaatttaccctctttggatggtgccaggtggacgtgacatctcgtgcctgcccggtgcgggtgcgttacagatggacgtagctgccttggttttccagtcctcaagggaatactgaagatgctgactgaaggggattggatgttgattttagaagatggagaactccagccacctttgtaaagcactagtgtttgtcatttatgtaagtcaggtcggctcaggtcttgatagtccgtcttggtgtgaggcatgcctgtcacgatgacctagctaacactgtgcatcttattgtgaggccagcttgtcccctcgaaccctctttggccaggtaaacattgtattgtatcagcgccagctacag

SEQ ID NO: 254 - DNA, 8317 bp, Homo sapiens
gacttctcaggcaccaccagcagcgccaccgagagttattattattttttgaccaagcagcacatttcctggttcagtggcttgagctctgtgagcagctgactagtcaccccgggtctggctcaggatcagctggtgacgctgggctggagtctatgacttcttccttcagattgtcatgaagaaggggagttaagaggaaactgggggtcctccggaaggcgatctgagcactcaggctgatctagaggaagagtagaagtcatactttttttctcttgcttggtgaattccccagcagagtctggatccagcagtgctgttttccctgagggaatgtggagcagctcggcttgagtctgttgccagcttcaggaagggttcagactgaaaagggggtttgaggagaagatgctttggctgcctgaggtcctgcttgcgttcttagaagtcagatccagggagaaagtgaactgggacaattgacaagctccaagggtctggcagaagcttcctccgagactgggcatttcatcctccctggaggaagatctgcctgcactgcaagtgtccccaggaggagcacatggtgacagtgatgccgctggagatggagaagaccatcagcaaactcatgtttgactttcagaggaactcgacctcagatgatgactcaggctgtgctttggaagagtatgcctgggtcccgccgggtctgaagcctgaacaggtacaccagtactatagctgtctcccagaagagaaagtcccttatgtcaacagtcctggagagaaactgcgaatcaagcagctactacaccagctgccgccacatgacaatgaggttcgatattgcaactccctggatgaggaagagaagagggagctgaagcttttcagcagccagaggaaacgcgaaaacttgggccgcgggaatgtcaggcctttcccagtcaccatgacaggagctatttgtgaacagtgcggaggccagatcaatggtggagacatcgctgtgtttgcgtcacgcgctggccacggcgtttgctggcacccgccgtgcttcgtatgcactgtctgcaatgagctcctggtggatctgatctacttttaccaagatgggaagatatactgtggcaggcaccatgctgagtgcctgaagccgcgctgtgctgcctgcgatgagatcatctttgcagatgaatgcacagaagctgaggggcgacactggcacatgaaacacttttgctgcttcgagtgtgagacagtgctgggcggccagcgctacatcatgaaggagggaagaccctactgttgccactgcttcgagtccttgtatgcagaatattgtgacacctgtgcccaacatataggtatcgaccaaggtcaaatgacctatgacggccaacactggcatgccactgagacctgtttctgctgtgctcactgcaagaaatccctcctggggcggccattcctcccgaagcagggccagatattctgctcacgggcctgcagtgctggggaagaccccaatggttctgactcctctgattccgccttccagaacgccagggccaaggagtcccggcgcagtgccaaaattggcaagaacaagggcaagacggaggagcccatgctgaaccagcacagccagctgcaagtgagttctaaccggctgtcagccgacgtagaccccctgtcactgcagatggacatgctcagcctgtccagccagacacccagcctcaaccgggaccccatctggaggagccgggaagagccctaccattatgggaacaagatggagcagaaccagacccagagccctctgcagctcctcagccagtgcaacatcagaacttcctacagtccaggagggcaaggggctggggcccagcccgaaatgtggggcaagcacttcagcaaccccaaaaggagctcgtcactggccatgacaggacatgctggcagcttcatcaaggaatgccgagaagactattacccggggaggctgagatctcaggagagctacagtgatatgtctagtcagagtttcagtgagacccgaggcagcatccaagtccccaaatatgaggaggaagaggaagaggaagggggcttgtccactcagcagtgtcggacccgtcatcccatcagttccctgaaatacacagaggacatgacgcccacagagcagacccctcggggctccatggaatccctggccctgtctaatgcaacaggcctctctgctgatggtggtgccaagcgccaggagcacctatcccgattttccatgcctgacctcagcaaagactctggaatgaatgtgtctgagaagctgagcaacatgggcactcttaactcgtccatgcagttccggagcgcagagtcagttcgcagcctgctctctgcccagcagtaccaggagatggagggaaacctccaccagctcagcaaccccattggctacagagacctgcagtcccacggaaggatgcatcagagctttgattttgatggagggatggcgggcagcaagctgccagggcaggagggcgtgaggatccagcccatgagtgaacgcacccggagaagagctacttcacgcgacgacaaccgccgtttccgacctcacaggtccaggcgttcccgacgctctcgctccgacaacgccctccacctggccagcgaacgcgaggccatctcccggttaaaagataggccccctctgagagccagggaggactatgaccaatttatgcgccagcggagcttccaggagagcatggggcatgggtcccggagggacctgtacggccagtgccctaggactgtgtcggacctggctttgcagaatgcctttggggaccgctggggaccctacttcgccgagtatgattggtgttccacctgctcctcctcttcagagtctgacaacgagggctatttcctaggagaacccatcccccagccagcgcgcctgcgatacgtcacaagcgatgagctgctgcacaaatacagctcctacggcctccccaaatcttccacattaggtggcagaggacagttgcacagcaggaaaagacagaagagcaaaaactgtatcatttcttaatatgattgggatcagggaatgggagaagatgggagctaagaatgtaaagtcagaaacttgcactgttttaaatgttaaagcgcttttgggggtggcttatgggggagaaaagggaaaatgctgtcagtagatggaggcaaggttacaggttgactcaataggtagtcacagttcttggcatgttgaatattatttgcacatttcactttggaaacacagtagactctatcgaggccaggcttggtcacttccttcccatcagttctgtgttgagttgccatctctcaagatggtaaattgtttcctgctcgcttttatcctctctggttctcttacttttaggacccttttttcagtaagtaatttgtttattagccaggacccaagactaagttatttacatgtccattgtaaatgcaatgtaaatgagagttctgataaaatatttttgtattttgtaatatcaaaggaatttctatatcgtaggactcagtggggacttgcatgcacatccaccattgtctctgagtagtattgaaatgtggcccggtaccacctttttttttttttttttttttctatacaaatttgttacatgtcagtgagacctttttcaaaggaacatattcaatttggctttttgtggctgaaaaaacataactgttagacccaaagcattttatgctccgttccatcttaaggagccatccttaagtctgctcccaccctcagtagaatttattttctacaaagtggtagtaatttttttttaaattgcaaatgtaatttttgccaattagagaaaccaaccggtgtcagtaaaattctgtgagaaatgccatccctgctgggaatgttgaagttacttaatgttgatctatcccttggggaaagtaaaagtgactgtgagtggtgccattgtgtgatgtcagcatgacgttgttttgaatgtggcattatgttctggtgctcatgtttcctggattgtattatctgctttcctttaccaaggcagacagaactgctgccttagcctgacaaccggttgtcctcaaagcaaatgaacttaagcatttgggattgagggacagaaggattctgagggggctctgcgagggacggtgtgtgacatgtcatgcctggagaaggaacaaggctatttgaaaacagaaggcaggtcaagggtagaagttaaaggagaatctgaaggcaggtcagggaaaagaagaactggaaatgaaacagaggacaggtgacaaccacctcgaagagctcgcagagattgtagaaagagtccagtgtaaccagcttagtaaccagagtatctggattacccaggaaggttgagctgctgagatttcagtggtgcaatgtctttaaaaaaacaggctttgttgggagggtatttccattttgaactttgaggactgttggtcagaaaatgggctcaaaagtgagtttgcttaatgaagacatttaacggttgtgctgtttatagtaaaataaaactccctaccttgcttcagttaaaaatgaagcacttggtttcttccatcctcctcctccccttaatggattgtggcagttgaaataatccatcggaggacccacctgtagtgagatgtactgtcgatgtagtgcccggtgtatctcagtggccatctgccatggtgaggtgagcgtgatctcttttcagtatagtagttaacattttctagtattttttatggagagaatgtcaaaagtggcatttcagaccccgtcccagatgggtctgaggaaaggaaggctgtaaaggacatggtaatggcactccattcgggatgtattaaaataatttgcttttcaggtattaatatgacatttgtcattgtcactgatttttttaaaaaagcaatgcacatgttggttgtggctgttttccgcatgctatcttcatatctaaatgcttcattaattatccgagcctccggagaattaactctattacgtttgtatagtaagtttgtaaactgcttggcaaactgattaagaaataatttgcaataccgtgttactaaagtggcaggtttctggtagaaattgtgcgagtccaatttggagttttaagttccttgattgatgaaactaaaaaggcaattttggaaaaagagagggggaaaagtagatcacttatcttagcaaacggttgaaaatatgtctgtcctctgtggccccaaatccagtgaaagaaattctcccagtaaaagttgcttcctaactctgtttttctcagaatacctcttacctttctcaaagaaagcttcaaccaccatcatcagaaagaaggtggcctaaaaactgacacatggccagtgcccggaggggtctggaggcataagtctagatgcccagagagcatccaggcactgaactgctcagagcttgagatgaaatgacatacaagcttcagggtaaaactgtctactagcaagattacctccctcaattctaccattgcagatttcttctgaccccaaatgcaaccttacagagaatgctgaatgaggaaggccaattccttacaatgatggcagaacccccaagcgaatgccctattgaggagaaggacatcactgtatttggaattctgcctgctagtgatagctcacacatcacatcccagaatcccactcccaatgcattatttcctgaggcaagaacttaaggtcctcacctaattcctccatcacaaccattaactcttattggacaagctcctcctgtgagtggggcctgtactcacttcctcttagttcataattccatcttcaagagactgatttccagaatagtaatctttttccagcgttctctcttctccaatgccctggttgttatttttcccacctctcctaatattgatcttcttgtcttttggttagaactgcaacttcggagttgagttcatttcctattgctgctcaattcagtagcaacatagctggcttgttcccagacccaggaagtataagtcattgacagtttcctgagtggctctgccaatccataccacccttggtactgtgaaaaggcttcttggcagccaggtggcattgaggatggtattcagggcgctttccttctgtcatatagttgtgggatctctaccaagtgtgaaggtgaatgaggtaagggagatcagaaccatgcttcctggtttttcatacatccaaggaagaagtcctggtgtgggttgtttgacaccttctttccactttcaccttttattttttattccttcctttctacccccaaccagtcgagcaaatgagcaattttgtgtttctaatacaggatctggaagtagtgctttctaatcctcatttcctgtaggatgttcctgcactataacaagattatgttttcttccttctgcagcagctttctgcttcttgggtactactagctattgttcaattcaggtgaggcctgtgatgacatatatgtagcatgtgctctgcgctccctgcaagctgagcagatacaaccaatgcatcactgtatactcttgctgagaatgtggatgcagcctcacagatctttgcaacactccaaccagccaggaccagttgatcagaactgatcttattggtctgataaccaatcttatttgtgaactgattcatatctgtctttccactcttggttttcttgccgtagaacaaaaacagtttaggaagcataattacgaacatttaggaaccaatatgtataagtaattcggagactccaattcacctgcccctcccccatcccaggttgtggaggctcgaggaagctgacttcttaggctaaaggacaaaaaaatctctttacctccttggccattttcatgttctctgccaattactataggcagtcttcattttgcagaggtgaggtaagacttcatcttattcttcatgtaatcccaccttctaacaaaaaataaataaatatttaaattccaaggagaagtgttctttgtgtatttctagcagaaaacagatgcttaagcctaagaaggaagatccgtccatgacaaaggaaagtggaaaactgaaccagttatctgaatacttcatgccaggacagttgctattagcaactgttttgcaccttcagggctttaaaatgggctctgcagacagcatttgcatatgcaagactcagtagccaagcctccactgccaattgttgaaggcagtttcagatcgccaccttttgaggtacatttctttaagcacaagagaagtagaaatggcctttgccttgtctccagtggtttgtccctctggtgcctcagcagataccagagcttattcttatgaccatttggaagtagtcctcaaagtaaagatcaagaaaaaattggattctttttccattttctcataatagtagcctagtcaacacaagactcccataaaatatgactcactattgggagccatactattttataagcttacttcctgctgacaaaactagctttcctcaaggaaatataaaggaggggaaagtcacatagtgttaggaaaacattcctgtgttttgaatacgatgaatccgtaggatagagaaaaatctgcttgttctattctgagagttctctgagatatcccttcactctgcttggcatttggccattgatattcaacaggtcactgaccaagcttttctaaatttttcagagagagttacttaccaataaggtctgttcttaaacctacctagttgattttcatatctttccataaagtgtcatgattctatcatagaccctgacttaacattgtaaggactatgagtcctccattttttaattaattattttttagcaaattaggacttcggcaggttttcctctcctaaactcattctttcctccacaggattgctttgtccatctcctctttcatttcaagtgcataaacaaaacctcaaagggcctgggaaggtgaggcaggccagagtctgtgttctgtgttgagtgtcaagctatttgttaagaaggtctgcaacaggcctttggtgtgggctctgccagagactgttctgaacactttgcttgagatccgtgccctgtaaaatggatatgatgttttactgatgtctgtaatacatttgtaaacttccaataaaatttgaataaaaaaaaaaaaaaaaaaaaaa

SEQ ID NO: 255 - DNA, 2689 bp, Homo sapiens
gatcttgggctgaggttcccgggcgggcgggcgcggagagacgcgggaagcaggggctgggcgggggtcgcggcgccgcagctagcgcagccagcccgagggccgccgccgccgccgcccagcgcgctccggggccgccggccgcagccagcacccgccgcgccgcagctccgggaccggccccggccgccgccgccgcgatgggcaacgccgccgccgccaagaagggcagcgagcaggagagcgtgaaagaattcttagccaaagccaaagaagattttcttaaaaaatgggaaagtcccgctcagaacacagcccacttggatcagtttgaacgaatcaagaccctcggcacgggctccttcgggcgggtgatgctggtgaaacacaaggagaccgggaaccactatgccatgaagatcctcgacaaacagaaggtggtgaaactgaaacagatcgaacacaccctgaatgaaaagcgcatcctgcaagctgtcaactttccgttcctcgtcaaactcgagttctccttcaaggacaactcaaacttatacatggtcatggagtacgtgcccggcggggagatgttctcacacctacggcggatcggaaggttcagtgagccccatgcccgtttctacgcggcccagatcgtcctgacctttgagtatctgcactcgctggatctcatctacagggacctgaagccggagaatctgctcattgaccagcagggctacattcaggtgacagacttcggtttcgccaagcgcgtgaagggccgcacttggaccttgtgcggcacccctgagtacctggcccctgagattatcctgagcaaaggctacaacaaggccgtggactggtgggccctgggggttcttatctatgaaatggccgctggctacccgcccttcttcgcagaccagcccatccagatctatgagaagatcgtctctgggaaggtgcgcttcccttcccacttcagctctgacttgaaggacctgctgcggaacctcctgcaggtagatctcaccaagcgctttgggaacctcaagaatggggtcaacgatatcaagaaccacaagtggtttgccacaactgactggattgccatctaccagaggaaggtggaagctcccttcataccaaagtttaaaggccctggggatacgagtaactttgacgactatgaggaagaagaaatccgggtctccatcaatgagaagtgtggcaaggagttttctgagttttaggggcatgcctgtgcccccatgggttttcttttttcttttttcttttttttggtcgggggggtgggagggttggattgaacagccagagggccccagagttccttgcatctaatttcacccccaccccaccctccagggttagggggagcaggaagcccagataatcagagggacagaaacaccagctgctccccctcatccccttcaccctcctgccccctctcccacttttcccttcctctttccccacagccccccagcccctcagccctcccagcccacttctgcctgttttaaacgagtttctcaactccagtcagaccaggtcttgctggtgtatccagggacagggtatggaaagaggggctcacgcttaactccagcccccacccacacccccatcccacccaaccacaggccccacttgctaagggcaaatgaacgaagcgccaaccttcctttcggagtaatcctgcctgggaaggagagatttttagtgacatgttcagtgggttgcttgctagaatttttttaaaaaaacaacaatttaaaatcttatttaagttccaccagtgcctccctccctccttcctctactcccacccctcccatgtccccccattcctcaaatccattttaaagagaagcagactgactttggaaagggaggcgctggggtttgaacctccccgctgctaatctcccctgggcccctccccggggaatcctctctgccaatcctgcgagggtctaggcccctttaggaagcctccgctctctttttccccaacagacctgtcttcacccttgggctttgaaagccagacaaagcagctgcccctctccctgccaaagaggagtcatcccccaaaaagacagagggggagccccaagcccaagtctttcctcccagcagcgtttccccccaactccttaattttattctccgctagattttaacgtccagccttccctcagctgagtggggagggcatccctgcaaaagggaacagaagaggccaagtccccccaagccacggcccggggttcaaggctagagctgctggggaggggctgcctgttttactcacccaccagcttccgcctcccccatcctgggcgcccctcctccagcttagctgtcagctgtccatcacctctcccccactttctcatttgtgcttttttctctcgtaatagaaaagtggggagccgctggggagccaccccattcatccccgtatttccccctctcataacttctccccatcccaggaggagttctcaggcctggggtggggccccgggtgggtgcgggggcgattcaacctgtgtgctgcgaaggacgagacttcctcttgaacagtgtgctgttgtaaacatatttgaaaactattaccaataaagttttgtttaaaaaaaaaaaaaaaaaa

SEQ ID NO: 256 - DNA, 4529 bp, Homo sapiens
gtctgcccgccgccgccactgctgctgccaccgccgtcgccgccgccgccgccgccgccgctgctgctgccggtgctaaggagttcgctggagccctttcctcagacccggcccggtcttcgcgcccggactcctggcgccagcgctaggcgcactcaccgctctgacgggtgcagacgcgggagttgtcccagactgtggagtggcgggcacggccccagccccccttcccttccctgaccccttcttgccatcgccccagacatggggaacgcggcgaccgccaagaaaggcagcgaggtggagagcgtgaaagagtttctagccaaagccaaagaagactttttgaaaaaatgggagaatccaactcagaataatgccggacttgaagattttgaaaggaaaaaaacccttggaacaggttcatttggaagagtcatgttggtaaaacacaaagccactgaacagtattatgccatgaagatcttagataagcagaaggttgttaaactgaagcaaatagagcatactttgaatgagaaaagaatattacaggcagtgaattttcctttccttgttcgactggagtatgcttttaaggataattctaatttatacatggttatggaatatgtccctgggggtgaaatgttttcacatctaagaagaattggaaggttcagtgagccccatgcacggttctatgcagctcagatagtgctaacattcgagtacctccattcactagacctcatctacagagatctaaaacctgaaaatctcttaattgaccatcaaggctatatccaggtcacagactttgggtttgccaaaagagttaaaggcagaacttggacattatgtggaactccagagtatttggctccagaaataattctcagcaagggctacaataaggcagtggattggtgggcattaggagtgctaatctatgaaatggcagctggctatcccccattctttgcagaccaaccaattcagatttatgaaaagattgtttctggaaaggtccgattcccatcccacttcagttcagatctcaaggaccttctacggaacctgctgcaggtggatttgaccaagagatttggaaatctaaagaatggtgtcagtgatataaaaactcacaagtggtttgccacgacagattggattgctatttaccagaggaaggttgaagctccattcataccaaagtttagaggctctggagataccagcaactttgatgactatgaagaagaagatatccgtgtctctataacagaaaaatgtgcaaaagaatttggtgaattttaaagaggaacaagatgacatctgagctcacactcagtgtttgcactctgttgagagataaggtagagctgagaccgtccttgttgaagcagttacctagttccttcattccaacgactgagtgaggtctttattgccatcatcccgtgtgcgcactctgcatccacctatgtaacaaggcaccgctaagcaagcattgtctgtgccataacacagtactagaccactttcttacttctctttgggttgtctttctcctctcctatatccatttcttccttttccaatttcattggttttctctaaacagtgctccattttattttgttggtgtttcagatgggcagtgttatggctacgtgatatttgaagggaaggataagtgttgctttcagtagttattgccaatattgttgttggtcaatggcttgaagataaactttctaataattattatttctttgagtagctcagacttggttttgccaaaactcttggtaatttttgaagatagactgtcttatcaccaaggaaatttatacaaattaagactaactttcttggaattcactattctggcaataaattttggtagactaatacagtacagctagacccagaaatttggaaggctgtagatcagaggttctagttccctttccctccttttatatcctcctctccttgagtaatgaagtgaccagcctgtgtagtgtgacaaacgtgtctcattcagcaggaaaaactaatgatatggatcatcacccagattctctcacttggtaccagcatttctgtaggtattagagaagagttctaagttttctaaaccttaactgttccttaaggattttagccagtattttaatagaacatgattaatgaaagtgacaaattttaaattttctctaatagtcctcatcataaactttttaaaggaaaataagcaaactaaaaagaacattggtttagataaatacttatactttgcaaagtcaaaaatggcttgatttttggaaacaatatagaggtattcatatttaaatgagggtttacatttgttttgttttgtaaccgttaaaaagaagttgtttccagctaattattgtggtgtactatatttgtgagcctagggtaggggcactgctgcaacttctgctttcatcccatgcctcatcaatgaggaaagggaacaaagtgtataaaactgccacaattgtattttaattttgaggtatgatattttcagatatttcataatttctaacctctgttctctcagtaaacagaatgtctgatcgatcatgcagatacaatgttggtatttgagaggttagtttttttcctacacttttttttgccaactgacttaacaacattgctgtcaggtggaaatttcaagcacttttgcacatttagttcagtgtttgttgagaatccatggcttaacccacttgttttgctatttttttctttgcttttaattttccccatctgattttatctctgcgtttcagtgacctaccttaaaacaacacacgagaagagttaaactgggttcattttaatgatcaatttacctgcatataaaatttatttttaatcaagctgatcttaatgtatataatcattctatttgctttattatcggtgcaggtaggtcattaacaccacttcttttcatctgtaccacaccctggtgaaacctttgaagacataaaaaaaacctgtctgagatgttctttctaccaatctatatgtctttcggttatcaagtgtttctgcatggtaatgtcatgtaaatgctgatattgatttcactggtccatctatatttaaaacgtgcaagaaaaaaataaaatactctgctctagcaagttttgtgtaacaaaggcatatcgtcatgttaataaatttaaaacatcattcgtataaaatattttaattttcttgtatttcatttagacccaagaacatgctgaccaatgtgttctatatgtaaactacaaattctatggtagctttgttgtatattattgtaaaattattttaataagtcatggggatgacaatttgattattacaatttagttttcagtaatcaaaaagatttctatgaattctaaaaaatatttttttctatgaaattactagtgcccagctgtagaatctaccttaggtagatgatccctagacatacgttggttttgagggctattcagccattccattttactctctatttaaaggccgtgagcaagcttgtcatgagcaaatatgtcaagggagtcaatttctgaccaatcaagtacactaaattagaatatttttaaagtatgtaacattcccagtttcagccacaatttagccaagaataagataaaaacttgaataagaagtaagtagcataaatcagtatttaacctaaaattacatatttgaaacagaagatattatgttatgctcagtaaataattaagagatggcattgtgtaagaaggagccctagactgaaagtcaagacatctgaatttcaggctggaaaactatcagtatgatctcagcctcagttctcttgtctgtaaaatggaagaactggattaggcagtttgtaagattcctcctaactttcacagtcgatgacaagattgtctttttatctgatattttgaagggtatattgctttgaagtaagtctcaataaggcaatatattttagggcatctttcttcttatctctgacagtgttcttaaaattatttgaatatcataagagccttggtgtctgtcctaattcctttctcactcaccgatgctgaatacccagttgaatcaaactgtcaacctaccaaaaacgatattgtggcttatgggtattgctgtctcattcttggtatattcttgtgttaactgcccattggcctgaaaatactcattgtaagcctgaaaaaaaaaatctttcccactgttttttctgcttgttgtaagaatcaaatgaaataatgtatgtgaaagcaccttgtaaactgtaacctatcaatgtaaaatgttaaggtgtgttgttatttcattaattacttctttgtttagaatggaatttcctatgcactactgtagctaggaaatgctgaaaacaactgtgttttttaattaatcaataactgcaaaattaaagtaccttcaatggataagacaaaaaaaaaaaaaaaaaa

SEQ ID NO: 257 - DNA, 1560 bp, Homo sapiens
atgggcaacgcccccgccaagaaggacaccgagcaggaggagagcgtgaacgagttcctagccaaagccagaggagatttcctctacagatggggaaaccccgctcaaaacaccgccagctcggatcagttcgaacggctcaggacgctgggcatgggctccttcgggcgggtgatgctggtgaggcaccaggagaccggcggccactacgccatgaagatcctcaacaagcagaaggtggtgaagatgaagcaggtcgagcacatactgaacgagaagcgcatcctgcaggcgatcgactttccgttcctcgtcaagctccagttctcctttaaggacaactcctacctgtacctggtgatggagtacgtgccgggtggggagatgttctcccgcctacagcgcgtcggaaggtttagcgagccccatgcctgtttctatgccgcccaggtcgtcctggccgtccagtacctacactcgctcgacctcatccaccgcgacctgaagcccgagaatctcctcatcgaccagcagggctacctgcaggtgacggacttcggtttcgccaagcgcgtgaagggccgcacttggaccttgtgcgggaccccagagtacctggcccccgagatcatcctgagcaaaggctacaacaaggccgtggactggtgggccctaggggtgctcatctatgagatggccgtgggcttcccacccttctacgccgaccagcccatccagatctacgagaagatcgtctctgggagggtgcggtttccctccaaactcagctctgacctcaagcatctgctgcggagcctgctgcaggtggacctcaccaagcgcttcggaaacctcaggaacggggttggcgacatcaagaaccacaagtggttcgccacaaccagctggatcgccatctatgagaagaaggtggaagctcccttcatcccgaagtacacaggccctggggatgccagtaactttgacgactacgaggaggaagagctccggatctccatcaatgagaagtgtgccaaggagttttctgagttttaggggtgtgcttgtgcccctgtgggttttctttcctttttgtttttggtggtttgggggatgggagggttggattgaacagccagagggccccagagttccttgtatctaatttcatcctcaccccaccctccagggttgggggagcaggaagcccagatatttggaggaacagaaacaccagctgctccctcaccccccgccccatgccttcctggtccctctgtgcttctctctttctcctcccacagggtcccccttgccccagcccccttctgcctgttttaaacgagtttctcagctctattcaggccaggtcttgctgttgtatcaagggacacggtgtggaaagaggggctcaaacttaactccagccctgaacaggcaccacttactaagagaggatgaatgaaaagcacacctaccctttggagtaatcctgcctgggaaggagagaggtttagtgccatgttcagtgggctgtttgctagaataaaaaattaaaac

SEQ ID NO: 258 - DNA, 8787 bp, Homo sapiens
ggccgcagctccccggcggaggcaagaggtggttgggggggaccatggctgacgttttcccgggcaacgactccacggcgtctcaggacgtggccaaccgcttcgcccgcaaaggggcgctgaggcagaagaacgtgcacgaggtgaaggaccacaaattcatcgcgcgcttcttcaagcagcccaccttctgcagccactgcaccgacttcatctgggggtttgggaaacaaggcttccagtgccaagtttgctgttttgtggtccacaagaggtgccatgaatttgttactttttcttgtccgggtgcggataagggacccgacactgatgaccccaggagcaagcacaagttcaaaatccacacttacggaagccccaccttctgcgatcactgtgggtcactgctctatggacttatccatcaagggatgaaatgtgacacctgcgatatgaacgttcacaagcaatgcgtcatcaatgtccccagcctctgcggaatggatcacactgagaagagggggcggatttacctaaaggctgaggttgctgatgaaaagctccatgtcacagtacgagatgcaaaaaatctaatccctatggatccaaacgggctttcagatccttatgtgaagctgaaacttattcctgatcccaagaatgaaagcaagcaaaaaaccaaaaccatccgctccacactaaatccgcagtggaatgagtcctttacattcaaattgaaaccttcagacaaagaccgacgactgtctgtagaaatctgggactgggatcgaacaacaaggaatgacttcatgggatccctttcctttggagtttcggagctgatgaagatgccggccagtggatggtacaagttgcttaaccaagaagaaggtgagtactacaacgtacccattccggaaggggacgaggaaggaaacatggaactcaggcagaaattcgagaaagccaaacttggccctgctggcaacaaagtcatcagtccctctgaagacaggaaacaaccttccaacaaccttgaccgagtgaaactcacggacttcaatttcctcatggtgttgggaaaggggagttttggaaaggtgatgcttgccgacaggaagggcacagaagaactgtatgcaatcaaaatcctgaagaaggatgtggtgattcaggatgatgacgtggagtgcaccatggtagaaaagcgagtcttggccctgcttgacaaacccccgttcttgacgcagctgcactcctgcttccagacagtggatcggctgtacttcgtcatggaatatgtcaacggtggggacctcatgtaccacattcagcaagtaggaaaatttaaggaaccacaagcagtattctatgcggcagagatttccatcggattgttctttcttcataaaagaggaatcatttatagggatctgaagttagataacgtcatgttggattcagaaggacatatcaaaattgctgactttgggatgtgcaaggaacacatgatggatggagtcacgaccaggaccttctgtgggactccagattatatcgccccagagataatcgcttatcagccgtatggaaaatctgtggactggtgggcctatggcgtcctgttgtatgaaatgcttgccgggcagcctccatttgatggtgaagatgaagacgagctatttcagtctatcatggagcacaacgtttcctatccaaaatccttgtccaaggaggctgtttctatctgcaaaggactgatgaccaaacacccagccaagcggctgggctgtgggcctgagggggagagggacgtgagagagcatgccttcttccggaggatcgactgggaaaaactggagaacagggagatccagccaccattcaagcccaaagtgtgtggcaaaggagcagagaactttgacaagttcttcacacgaggacagcccgtcttaacaccacctgatcagctggttattgctaacatagaccagtctgattttgaagggttctcgtatgtcaacccccagtttgtgcaccccatcttacagagtgcagtatgaaactcaccagcgagaacaaacacctccccagcccccagccctccccgcagtgggaagtgaatccttaaccctaaaattttaaggccacggccttgtgtctgattccatatggaggcctgaaaattgtagggttattagtccaaatgtgatcaactgttcagggtctctctcttacaaccaagaacattatcttagtggaagatggtacgtcatgctcagtgtccagtttaattctgtagaagttacgtctggctctaggttaacccttcctagaaagcaagcagactgttgccccattttgggtacaatttgatatactttccataccctccatctgtggatttttcagcattggaatcccccaaccagagatgttaaagtgagcctgtcccaggaaacatctccacccaagacgtctttggaatccaagaacaggaagccaagagagtgagcagggagggattgggggtgggggaggcctcaaaataccgactgcgtccattctctgcctccatggaaacagcccctagaatctgaaaggccgggataaacctaatcactgttcccaaacattgacaaatcctaacccaaccatggtccagcagttaccagtttaaacaaaaaaacctcagatgagtgttgggtgaatctgtcatctggtaccctccttggttgataactgtcttgatacttttcattctttgtaagaggccaaatcgtctaaggacgttgctgaacaagcgtgtgaaatcatttcagatcaaggataagccagtgtgtacatatgttcattttaatctctgggagattatttttccatccagggtgccatcagtaatcatgccactactcaccagtgttgttcgccaacacccacccccacacacaccaacattttgctgcctaccttgttatccttctcaagaagctgaagtgtacgccctctccccttttgtgcttatttatttaataggctgcagtgtcgcttatgaaagtacgatgtacagtaacttaatggaagtgctgactctagcatcagcctctaccgattgattttcctcccttctctagccctggatgtccacttagggataaaaagaatatggttttggttcccatttctagttcacgttgaatgacaggcctggagctgtagaatcaggaaacccggatgcctaacagctcaaagatgttttgttaatagaaggattttaatacgttttgcaaatgcatcatgcaatgaattttgcatgtttataataaaccttaataacaagtgaatctatattattgatataatcgtatcaagtataaagagagtattataataattttataagacacaattgtgctctatttgtgcaggttcttgtttctaatcctcttttctaattaagttttagctgaatcccttgcttctgtgctttccctccctgcacatgggcactgtatcagatagattactttttaaatgtagataaaatttcaaaaatgaatggctagtttacgtgatagattaggctcttactacatatgtgtgtgtatatatatgtatttgattctacctgcaaacaaatttttattggtgaggactatttttgagctgacactccctcttagtttcttcatgtcacctttcgtcctggttcctccgccactcttcctcttggggacaacaggaagtgtctgattccagtctgcctagtacgttggtacacacgtggcattgccgcagcacctgggctgacctttgtgtgtgcgtgtgtgtgtgtttccttcttcccttcagcctgtgactgttgctgactccaggggtgggagggatggggagactcccctcttgctgtgtgtactggacacgcaggaagcatgctgtcttgctgcctctgcaacgacctgtcgtttgctccagcatgcacaaacttcgtgagaccaacacagccgtgccctgcaggcaccagcacgtgcttttcagaggctgcggactttcttccagccattgtggcattggcctttccagtcttgggaggagcgcgctgctttggtgagacacccccatgcaaggtcctcagagtagccgggttctaccacaaacagaaacagaatgaaagtagctgtcagtccttgtagagagccgctctgtttcctcccagaagcatctcccagctaagctcgcattatttttctcctctggctgtttgcctgaagttcacagaacacacaaccatgaaaggctttttgaggtgagaggcccaggtggtcctggcaaccctgagtagaaggagagacggggtagggaacgggcccggccagaaaagaaccatttcttctgccatcttttatgcaccatagacatcgagactccagggggtcctggctcccctgtccctgcagccctgcaggtcagtgcatgatctgggttcgtgtcctgaccaggtgctcctcctttgatccgaggggaaagggactggtttatagaaagagcctaggagacaaaagggccagtccccctgcccagaatggagcagcagcaggacagacccccacgaggccccccagagaggaggaagatcccacggaggaacacatgaggttagggacccttgttcagcaccccaaacagcctgcctgtttaaagcaggcagcaggcttaggccttccctgcaaccccaacacccacaagtttgtttctctaggaaacacattcactgtctcagctggctgttactctctcagaccatatggcaaagttttccaagaaaatgccccgacaggggtgcccagcacactgcctgagggacaacagacatcagaacaaacccccagagagaaacagtcaaaatcagggcccggtgcagtgttgtcatgtggaacctgctttatccattgctgagtgttgaatgtgggtaatggttagggctttccagatctcagcagccaaagacagttattgttggaagactgtcatgtagataaccatgagcaatggctcgcctcagaatcagttcataaaattctatggtactggccccttcgtgggtattgtgtgaaatgagatggtggcgaggggtgcgctgtggaactgccgcagccacgcaggaggtccctgggggatgctttgggaagtccttgcccctgagcactgcctgattgccagggcctgtggaggtctaggccgcctggcagaatctagcaccgtccgaatccccgcaggacccatggagctatgaccacaccaggccattcaaatggctctgcattatcttcccttggaaggtggccactcctcggtggcagggcctttccctgaggctgcaggccgtgggctggcagcccgtctcttggcatttcaattgaaggtcaccaggtgctgggtttgaaaggaagtcactggagtgctgccaggggccgccctccaaggttaatgagaggcccacatccaggcaagaactaattcaaaaggcagatcagaaaccacaggagtcaaaattattgctccggcagtgcttcccttcctttcatccactggcctcgtgtggtccatgcagggccactgtctgccctttctgatgccacgtattaggctttcttactcagaattttgatagaaaaccatggggccaagagctctggaagcctggccggaaagaccaaggttcatgcagcccaacaaatgattgttgagcacctctcggagccaaagtccttaggcgagtgtggtgacttcctggaaggaggatgcagacttccagagagcccccccaacggacgtgctgagaagggagagggaggcgggggctgtagtcaggaaggagccagagaagaacagggtttgggtgcatccagaaatatgcctgcagtaggagggagaggaaggggtgccaccgtcaacggcttcccatcggaggtggttggtgcagatggaagtttctgtctgctggccctcaagagagtgttttgccagggacacagtctgttcctcctcagaaaacaccccccaaatgctaacaacatccccaccagctgctagaagcccctttcccctccccaccttgaagtagctcatagttctctgggcagagccagaccatccagtgtaccccagaggccagtaggttcctgcccattttcctctctggcttcctgccaagaattatggcagctgaggatgaatggagaagtaaaaacaactaacaccgcacaactaacaactaacaccgcagttcccacctgggttccacttagcaggagacatttcggagggttttttttgtttttgttcctgttttttttttttttgctggaatttgttttctcagtactgaaaagagaaaaagtgacaatcttgtatttttaaaagcctcggaaaggtgataccatctgacagtcattttctcacgttggtcttctaaagtcacctatttcttgtgtgtgcacatcacaccatttcctgtttctttataacccgacaagggtaggagtgcctgtttcccctgctgggcacaccagacaatcgtaatcacaaaacagacactgagccaggggcccaaagggtgtgatcatgagagttaccgggacagcagtaggcatgacagtcaccaggaaggacaagggtgctctgttgttagtggccacacaccaatttgacaaggagtgttgcgaaatttttatttatttatttatttattttgagatggagtttcactcttgttgcccaggctggagtgcggtggtacaatctcggctcactgcaacctccacctcccaggttcaagcgattctcctgcctcagcctcccaagtacctgggactacaggtgcgtgccaccacacccagctaaattttgtgtttttagtagagatggggtttcaccatgttggccaggatggtcttgaacccctgacctcatgatctgcctgcctcggcctcccaaagtgctgggattacaggcatgagccaccacgcccagccaaaatatttttttaaagtcattttccttaagctgcttgggctacatgtgaaatacactggacggtcaacattcctgtctcctcccatttgggctgatgcagcagatccagggaatgttacctgtttctgctgctagaagatccaggaaattgggaaggttacctgacgcacacatggatgaaggccatcatctagaaatggggtcaaccacaattgtgttaattccgtagtgtcagggattcttcgggaaggtcaacagtatgaaggattctgacccctgtgcctcccatttatgtgatcaggtgacagttaataaccgtggaggtcacactcagccatccaacagccttacagtgaccctacacaaaagcccccaaattccaaagactttttcttaacctaaaggaagaaattatttgttaattccagtagagcaactgaatatactgggctatttgtacttttttatagagaactttaataataattctttaaaaatgagtttttagaacaaagcaactgacgatttcctaagattccaatgccctggagcttgtaggaggacttagcctgggtcagctggagcacccccgacctgatctcccactgccagattttcccatgctcctagggtatggagtccacgtgggaatgactgcaagttcaggtggaacttggccgactgatgctctgcgagtttttaatagacactggggacaactgcttaaggtttagaaacttccaaaccacaggaaagacatttttagtgtcccccatccagaggcagccctggaataggattcccaggggtttctgggacccctttccttgctccgtgaggctctgtggccatcttttggcaggaggaggatgcttccttggctctgtgcccagacccgcctggtccccaggtctctcaccttgggtgaagattcagagatgccctgtaaggattttgcccactgggcaactcagaaatacttcgatctcccaagatataagaggcagcagcaaacgtgcctattgacgtctgtttcatagttaccacttacgcgagtagacagaactcggcttttcagaaaataggtgtcaagtccactttataagaacctttttttctaaaataagataaaaggtggctttgcattttctgattaaacgactgtgtctttgtcacctctgcttaactttaggagtatccattcctgtgattgtagacttttgttgatattcttcctggaagaatatcattcttttcttgaagggttggtttactagaatattcaaaatcaatcatgaaggcagttactattttgagtctaaaggttttctaaaaattaacctcacatcccttctgttagggtctttcagaatatcttttataaacagaagcatttgaagtcattgcttttgctacatgatttgtgtgtgtgaaggacataccacgtttaaatcattaattgaaaaacatcatataagccccaactttgtttggaggaagagacggaggttgaggtttttccttctgtataagcacctactgacaaaatgtagaggccattcaaccgtcaaacaccatttggttatatcgcagaggagacggatgtgtaaattactgcattgctttttttttcagtttgtataacctctaatctccgtttgcatgatacgctttgttagaaacattaattgtagtttggaagcaagtgtgtatgaataaagataatgatcattccaaaaaaaaaaaaaaaaa

SEQ ID NO: 259 - DNA, 2319 bp, Homo sapiens
gggcgagtgacagccccggctccgcgcgccgcggccgccagagccggcgcaggggaagcgcccgcggccccgggtgcagcagcggccgccgcctcccgcgcctccccggcccgcagcccgcggtcccgcggccccggggccggcacctctcgggctccggctccccgcgcgcaagatggctgacccggctgcggggccgccgccgagcgagggcgaggagagcaccgtgcgcttcgcccgcaaaggcgccctccggcagaagaacgtgcatgaggtcaagaaccacaaattcaccgcccgcttcttcaagcagcccaccttctgcagccactgcaccgacttcatctggggcttcgggaagcagggattccagtgccaagtttgctgctttgtggtgcacaagcggtgccatgaatttgtcacattctcctgccctggcgctgacaagggtccagcctccgatgacccccgcagcaaacacaagtttaagatccacacgtactccagccccacgttttgtgaccactgtgggtcactgctgtatggactcatccaccaggggatgaaatgtgacacctgcatgatgaatgtgcacaagcgctgcgtgatgaatgttcccagcctgtgtggcacggaccacacggagcgccgcggccgcatctacatccaggcccacatcgacagggacgtcctcattgtcctcgtaagagatgctaaaaaccttgtacctatggaccccaatggcctgtcagatccctacgtaaaactgaaactgattcccgatcccaaaagtgagagcaaacagaagaccaaaaccatcaaatgctccctcaaccctgagtggaatgagacatttagatttcagctgaaagaatcggacaaagacagaagactgtcagtagagatttgggattgggatttgaccagcaggaatgacttcatgggatctttgtcctttgggatttctgaacttcagaaagccagtgttgatggctggtttaagttactgagccaggaggaaggcgagtacttcaatgtgcctgtgccaccagaaggaagtgaggccaatgaagaactgcggcagaaatttgagagggccaagatcagtcagggaaccaaggtcccggaagaaaagacgaccaacactgtctccaaatttgacaacaatggcaacagagaccggatgaaactgaccgattttaacttcctaatggtgctggggaaaggcagctttggcaaggtcatgctttcagaacgaaaaggcacagatgagctctatgctgtgaagatcctgaagaaggacgttgtgatccaagatgatgacgtggagtgcactatggtggagaagcgggtgttggccctgcctgggaagccgcccttcctgacccagctccactcctgcttccagaccatggaccgcctgtactttgtgatggagtacgtgaatgggggcgacctcatgtatcacatccagcaagtcggccggttcaaggagccccatgctgtattttacgctgcagaaattgccatcggtctgttcttcttacagagtaagggcatcatttaccgtgacctaaaacttgacaacgtgatgctcgattctgagggacacatcaagattgccgattttggcatgtgtaaggaaaacatctgggatggggtgacaaccaagacattctgtggcactccagactacatcgcccccgagataattgcttatcagccctatgggaagtccgtggattggtgggcatttggagtcctgctgtatgaaatgttggctgggcaggcaccctttgaaggggaggatgaagatgaactcttccaatccatcatggaacacaacgtagcctatcccaagtctatgtccaaggaagctgtggccatctgcaaagggctgatgaccaaacacccaggcaaacgtctgggttgtggacctgaaggcgaacgtgatatcaaagagcatgcatttttccggtatattgattgggagaaacttgaacgcaaagagatccagcccccttataagccaaaagctagagacaagagagacacctccaacttcgacaaagagttcaccagacagcctgtggaactgacccccactgataaactcttcatcatgaacttggaccaaaatgaatttgctggcttctcttatactaacccagagtttgtcattaatgtgtaggtgaatgcaaactccatcgttgagcctggggtgtaagacttcaagccaagcgtatgtatcaattctagtcttccaggattcacggtgcacatgctggcattcaacatgtggaaagcttgtcttagagg

SEQ ID NO: 260 - DNA, 3142 bp, Homo sapiens
cggagctggagctcccaccgccgccgcccgtgcctccggctgccggcgcccctgcctttggctcttcctccccactcgcccgctccccctggcggagccggcgcgcccggggtgccgctccctgcctggcgcgctccgcacctggaggtgccttgcccctctcctgcccacctcggaatttccctgtggctcctttgatccttcgagtctccagctcctctcccttccacctgtttcccccaagaaaggcaggatcctggtccctgctacgtttctggggccatggctggtctgggccccggcgtaggcgattcagaggggggaccccggcccctgttttgcagaaagggggccctgaggcagaaggtggtccacgaagtcaagagccacaagttcaccgctcgcttcttcaagcagcccaccttctgcagccactgcaccgacttcatctggggtatcggaaagcagggcctgcaatgtcaagtctgcagctttgtggttcatcgacgatgccacgaatttgtgaccttcgagtgtccaggcgctgggaagggcccccagacggacgacccccggaacaaacacaagttccgcctgcatagctacagcagccccaccttctgcgaccactgtggctccctcctctacgggcttgtgcaccagggcatgaaatgctcctgctgcgagatgaacgtgcaccggcgctgtgtgcgtagcgtgccctccctgtgcggtgtggaccacaccgagcgccgcgggcgcctgcagctggagatccgggctcccacagcagatgagatccacgtaactgttggcgaggcccgtaacctaattcctatggaccccaatggtctctctgatccctatgtgaaactgaagctcatcccagaccctcggaacctgacgaaacagaagacccgaacggtgaaagccacgctaaaccctgtgtggaatgagacctttgtgttcaacctgaagccaggggatgtggagcgccggctcagcgtggaggtgtgggactgggaccggacctcccgcaacgacttcatgggggccatgtcctttggcgtctcggagctgctcaaggcgcccgtggatggctggtacaagttactgaaccaggaggagggcgagtattacaatgtgccggtggccgatgctgacaactgcagcctcctccagaagtttgaggcttgtaactaccccctggaattgtatgagcgggtgcggatgggcccctcttcctctcccatcccctccccttcccctagtcccaccgaccccaagcgctgcttcttcggggcgagtccaggacgcctgcacatctccgacttcagcttcctcatggttctaggaaaaggcagttttgggaaggtgatgctggccgagcgcaggggctctgatgagctctacgccatcaagatcttgaaaaaggacgtgatcgtccaggacgacgatgtggactgcacgctggtggagaaacgtgtgctggcgctggggggccggggtcctggcggccggccccacttcctcacccagctccactccaccttccagaccccggaccgcctgtatttcgtgatggagtacgtcaccgggggagacttgatgtaccacattcaacagctgggcaagtttaaggagccccatgcagcgttctacgcggcagaaatcgctatcggcctcttcttccttcacaatcagggcatcatctacagggacctgaagctggacaatgtgatgctggatgctgagggacacatcaagatcactgactttggcatgtgtaaggagaacgtcttccccgggacgacaacccgcaccttctgcgggaccccggactacatagccccggagatcattgcctaccagccctatgggaagtctgtcgattggtggtcctttggagttctgctgtatgagatgttggcaggacagcctcccttcgatggggaggacgaggaggagctgtttcaggccatcatggaacaaactgtcacctaccccaagtcgctttcccgggaagccgtggccatctgcaaggggttcctgaccaagcacccagggaagcgcctgggctcagggcctgatggggaacctaccatccgtgcacatggctttttccgctggattgactgggagcggctggaacgattggagatcccgcctcctttcagaccccgcccgtgtggccgcagcggcgagaactttgacaagttcttcacgcgggcggcgccagcgctgacccctccagaccgcctagtcctggccagcatcgaccaggccgatttccagggcttcacctacgtgaaccccgacttcgtgcacccggatgcccgcagccccaccagcccagtgcctgtgcccgtcatgtaatctcacccgccgccactaggtgtccccaacgtcccctccgccgtgccggcggcagccccacttcacccccaacttcaccaccccctgtcccattctagatcctgcaccccagcattccagctctgcccccgcgggttctagacgcccctcccaagcgttcctggccttctgaactccatacagcctctacagccgtcccgcgttcaagacttgagcggagcccgatattctccctgaccttagcgttctggactctgccccaatcgggtccagagaccacaccactaaccatccccaactccatggggttcgagactccatcttggtagttctgtgcctccccccagaccccgcccctggggaaatagcctcacggggttggctgttccagactcaggttccagaacagccctcggcctccgaggctccccgcctccactctagttctagatgagtgggaggcgtgcccccctcctccagtacgtcccgctgctgtgctctggggatttctgggatatatggaggattctttccccagaggctcccaatcagcttttgttctagacttccccatcccgaagccatcacttctccccgcagcccgcctgccgtgcatggctcctgtctggctcggacccaccccaactctccccagtgcctgccactctctgggactctcctcctcccctcctcttcccttagcctctcccacccggccacagctgctggagaataaatttgggatgctgatgaaaaaaaaaaaaaa

SEQ ID NO: 261 - DNA, 6033 bp, Homo sapiens
cacgcgtccggagctggaggaggcggcgggcgcgagacccggaatgcgcagggcccccgcctcgccccccccagcccgggccgcggcccccgccttccccgcagtcgtcccgcactcggtgcccgccccccgaggccggcggctgctcccactcggggccgttgctgcttgtgccgtgagcgccgcccagccattgtccccgtcgctccgtcagccgcgccggaccgcgcaccaggaggcgagagcgcgcatggggagcctctgttgatgccgccgccgcgccgccctccgaggctgcgtcccgggaagcccggctccccgagcgctccggcctggcccggtgccccggacctgagtgcgtccccatggaggcgcccgggctggcccaggcggccgcggcggagagcgactcccgcaaggtggcggaggagacccccgacggggcgcccgcgctctgccccagccctgaggcgctgtcgccggagccgcctgtgtacagcctgcaggactttgacacgctggccaccgtgggcactgggacgttcgggcgggtgcacctggtgaaggagaagacagccaagcatttcttcgccctcaaggtgatgagcattcctgacgtcatccgcctaaagcaggagcaacacgtacacaatgagaagtctgtcctgaaggaagtcagccacccgttcctcatcaggctgttctggacgtggcatgacgagcgcttcctctacatgctcatggagtacgtgccgggcggcgagctcttcagctacctgcgcaaccgggggcgcttctccagcaccacggggctcttctactctgcagagatcatctgtgccatcgagtacctgcactccaaagagatcgtctacagggacttgaagccagagaacatcctgctggatagggatggccacattaagctcacggactttgggttcgccaagaagctggtagacaggacttggaccctctgtggaacacccgagtacctagcccccgaagtcattcagagcaagggccacggaagggccgtggactggtgggccctcggcatcctgatattcgagatgctttcggggtttcctccgttttttgatgacaacccgtttggcatttatcagaaaattcttgcaggcaaaatagatttccccagacatttggatttccatgtaaaagacctcattaagaaactgctcgtggttgacagaacaaggcgattaggaaacatgaagaacggggcgaatgatgtgaagcatcatcggtggttccgctccgtggactgggaagctgttccgcagagaaaactgaagcctcccatcgtgcccaagatagctggtgacggcgacacttccaacttcgaaacttaccctgagaatgactgggacacagccgcgcccgtgccgcagaaggatttagaaatcttcaagaatttctgaggacaggagctcacatctggaagaaacaggaagattggaatctgcctggaacaaagaactgcacctaagcagaccagaagcaaaatgtcttcttcacggcataaggacatctccacttttctctgtacctgtgtgtatagaaatagattagagcacagttgaaattcatggaactggcattatttaagcaactggaattccacactgtaggaaggttttgaaaattgtttggttgtagattttatcttatcctttagtgttgtgttcctactgtgatgtcttggtttttgtcatagacttaagtttataagtttgaactggacttgttcgattataaccacaaattgtgtgtgtgtgtgtgtgtgtgtgtgtgtgtgtgtgtatgcctgtgtgtatatatagaagtcattatggcagatgcacagaaattgtgcagtgatgtaaatgttcatactttacagagcctataatttttatttttcaatttgttttttcaaaaatctcttctcggggacaacatctgaagggtatgttgcatgcattaaaaaaaatcatctcacatgcattttatagttttggggaagaaaatatcatggggaggtctaccttcagtatctttagttcttcttaccgggtaacttgagactttaaaagaagaaacaaagaggggaagatatgggagcgaatttattccaagaatctacaatgacattgaagttgttggaggaatgtactgtatttaaaaaaaccttctgtgacacattcaaaaatttcatctgagctggatgcagtggcttgttcctatagtcccagcactttgggaggctgaggtgggtggattgcttgagcccaggagttggagaccagtctgggaaacgtggtgagacctcatctctacaaaatacaaaaaaattagccgggcatggtggcacgtgagttaggtctcagctactcaggaggctgagatgagaggatcacttgagcctggggaggtccaggccgcagtgatccgagatcacaccactgcattccagcctgggtgacagagtgagaccctgtccaaaaaaaaaaaaaaaaaaaagaaggcaatggctttgtgcttttgaagatggattgaagagaacgtccaccttaaggctttaaaagacagtgaagctgggtgcggtggtgcactcctgtaaccctgggactttgggaagctgaggcaggaagattgagcctaggagttcgagactgacctgggcagcatagcgagaccccatctctatataaaaaaaaagatgttaaaacagtgaaattacagaaacagaacatagccaccctttttcatcagtgaccttttcttcacgtggaggtcaactcagtaggtgagaataattagtaggttcagcagaataaactctttacaattaataactcagtggaaaatgatgttcagatggtgaaatgtggaaatgttttagacaactctattttcagcctgtgcttctcactcaccatcctgttgggattaacagttgagggccatcgctgcctaaacatttagcgtgcggtttcccatcagttttaccgtgaatgtgaaaaggtgaaactggtgctgacttcggcagcaggtatactaaaattggaatgacacagaggagattagcatggccccctgcgcgaggaagatctgcagattcatgcagcattccatatttttttaagaaaaggttacactgtgcaccgacatgtggagctagaaggaaaagcttttaagtctcatgtttgctgactataaaaataaatcatagtaataatattgaacattctactttaaaaattattaataaaaccataaatgaaacacttgagcacactttaaaaagtacataaatccatgagtccatatgcctatttttaggttgtctgttttattatccaggatttcatactcagatgagaattagcatcaggaaagcctgaaatgccttaattgtgaactgatatgcaggaaaatgaaatatgcaagcacattggtgaccttgttctttacagacgtcgtgatcagcctccagccatacagaacaaatgagaaattagaagcgattccaagaacgtgtgatggtgtgaacccactttggaccatcacacacatttcagcatttgaagtgacacaagctacctggtaactgcccatggcggggtcatagtttaaatggcccaatgtcatgtagaggttaatttaatcaaaatgagctataaacatggagcaatcactgtataattttaaaatagtttacctggccaggcatggtcgtcacgcctgtaatcccagcactttgggaggccgaggcaggtggatcacctgaggtcaggagttcgagaccagcctggccaacatggcaaaacccccgtctctactaaaatacaaaaattaggtgtggtggcgggcacctgtaatcctggctactcgggaggctgaggcaggagaatcgcttgaacccgggaggcagaggctgcagtgagccgagatcgtgccactgcactccagcctgggccacagagcaagactccgtctcaaaacataaaaataaaaaaaatacaaatagctgacccgggtgggcattccaaaatgtccgcatggacgatcacgaaacaatcacggtgcgaaatgtccgcatggatgatcacgaaacaatcacggtgcggaatgtccgtatggatgatcatgacaaacaatcactgcgcaaaatgtggaggaaaattcattaccataatcacaacatttgtatcagaaaaacattacaaatttactttgcttcatgtaattttacgagttggcaatattttcttaaattggaatactctaagagaataggacatggatatgttacaagaagaagtgtattggggcaagtcttgtttttctgaagggaaatgccaccggcctgctttcataggcattgataaagccaggaaggaaataaagtcacaaccaaatagtatacactgtctctactgaattcttctaattccttcgcaacagaagtctaaatcctgcttagcctaaacatatctatagccagcgatgggcaaattatatttgctgtcagcatgatagaataagaagcagaaaccccccagcagtggggtaagattgcgcgcttcatcccctcaaaatgcagctcagccccactccctctccatgcccatcaaacaactgcacaatcacttgttactgaatttcccattcagcgttttgtttctttctgtccatacttaaagaccaaatcatttgtttgctttgaagaaaaagcaaaaacaagaacaaaaacaccaaatcatttgaaatcactgtccattaaaaaaaatcaccagtggaactaaacagttgagtggtttgggatgtgttcgccatttctgtgtttgacctacatggcctgtaattctttggaccattgtaactgtgaactatggcttaatactgttaaagaccccaaggctccactctgtagccaggtgcacctcaggctgcacaaataccccaccagaatgtcacaatcattcattgctccagctactgagtgaacagggtgcaagacagcactggcttgggttgtatttttgcagccagttaactttgcatcaggtctacacagtccttgcagcctttgatttctccagttgtagagatttgaaatggggtgcccgggttgctctcgtttttccttcaagctacctagcatgcattttacacacattggaggagtcgtatgcactgtttttctgttgctgatggaggcaagcaggccttctaattagtctaagttaaacggatgggattcacttaagaaaagcaagaagaaaagcacacgaacaggtgtcttaatgcatttggatagtttctttgcggggtgtgtgtgtgtgtgtgtgtgtgtgtgtgtgtgtgtgtgtcttggtgaaggtgaggggctgtattttcaccaagccttttcataatcaagtttgctttgcaaaccttatggccttgcaccccgcagaacagtcccttcctaatagcagggatgctctgtcatggtttttctgtaaattatcgtgtgttgggaagttctgttgaggcttagtttgatcttccatggtggacacgtctgttctgtatgtaaaaggcattacaattgtgttttagcagatgagacttgaagcctttccacagtccttgtgctctgagatggctgttgagctctgctcaactgtcgtagctgaattctttctttgcgctgaacactgggcagcctcaccatgttgccaacgtgcttctggggcccctgtcactgccgctggatgccgcgcacacaggcagagtgccttggcaggtttgtgcaccccttggcgagccagaactgggaaccccgcggggtgaccccttctcatggggggtcggggaggggagtgcctatttttaatcctgtctgtttgttgcacaatggaaatcactgtgatttgtacatatgccctaggaaaattttactgctgtctaatttatgtaataatactgttgattccaggtttatttaataaaactttgtatcttttcagaaaaaaaaaaaaa

SEQ ID NO: 262 - DNA, 7216 bp, Homo sapiens
cacgcggccaccgagctggaggaggcggcgggcgtgagaccgggaatgcttggggcccccgccttcctcgcagccatccagcactcggtgcacgccccgcgaggccagcggctgctccctcccggggctattgctgctagtgccgtgagcaccgcccagccattgtctctgtgtctccgtcagccgtgccgagccgcgcacccagaggcgagggcgcgcatggggagcctccgttgatgctgccgcggctgccgcgccgccctccgaggctgcgtcccggggagtccggcttcccgagcgctccggcctggcccggcgccccggacctgagtgcctccccatggaggcgcccgggccggcccaggcggccgcggcggagagcaactcccgagaggtgacggaggatgccgccgactgggcgcccgcgctctgccccagccccgaggcgcggtcgccggaggcgcctgcctaccgcctgcaggactgcgacgcgctggtcaccatgggcactgggacgttcgggcgggtgcacctggtgaaggagaagacagccaagcatttcttcgccctcaaggtgatgagcattcccgacgtcatccgccggaagcaggagcagcacgtgcacaatgagaagtctgtcctgaaggaagtcagccacccgttcctcatcaggctgttctggacgtggcatgaggagcgcttcctctacatgctcatggagtatgtgccgggtggcgagctcttcagctacctgcgcaaccgggggcacttctccagcaccacggggctcttctactctgcggagatcatctgtgccattgagtacctgcactccaaggagatcgtctacagggatttgaagccggagaacatcctgctggatagggatggtcacatcaagctcacggactttgggtttgccaagaagctggtagacaggacttggaccctctgtggaacacccgagtacctagcccccgaagtcattcagagcaagggccacggaagggccgtggactggtgggccctcggcatcctgatattcgagatgctttcggggtttcctccattttttgatgacaacccgtttggcatttatcagaaaattcttgcaggcaaactatatttccccagacatttggatttccatgtaaaaacggggcgaatgatgtgaaacaccatcggtggttccgctccgtggactggaaagctgttccgcagagaaaactgaagcctcccatcgtgcccacgatagctggcaacggcgacacttccaacttcgaaacttaccctgagcatgactgggacacagccgcgcccgtgccgcagaaggatttagaaatcttcaagaatttctgaggacgagctcacatctggaagaaacaggaagattggaatctgcctggaacaaagaactgcacctaagcagaccagaagcaaaatgtcttcttcacggcctgaggacatttccagttttctctgtacctgtgtgtatagaaatagatcagagcacagttgaaattcatggaactggcattatttaagcaaccagaattccacactgtaggaaggttttgaaaattgtttcgttatagattttatcttatcttttggtgttgtcttggtttttctcatagactttataagtttgaactggacttatttgattataaccacaaattgtgtgtgtgtgtgtgtgtgtatatatagaagtcattatggcagatgcacaaattgtgcagtgatgtaaatatacatacttcacagagcctattatttttatttttcaattcagtttctcaaattatcttcccttctcttggggacaacatctgaagggtatgttgcatgcatttttaaaaaaatcatctcatatgcattgtatagtttgggggaataagatatccgggggccgggggtgtctacattcagtatctttagttcttcctacctagtaacttgagactttaaaagaagaaacatggagaagatgtgggagcgaatttattgcaggaatccacaatgactttgaagttgttggagcaatgcattgtattcagaaaacctgtgtcacattaaaaaatttcatctaggctaggtgcagtggcttgttcctgtagtcccagcactctgggaacctgggttgggaggattgcttaaggccaggagtttgagaccagcttgggcaacatagtgaaaccctgtctgtatggaatttacacaaattataaaaattagtcgggtgtcattgtgcatacctgtagtcccagctattcaggagctgtggtaggaggatggcttgagctcaagaggttgaggctgcagtgagccctgattgtgccagtgcactccagcctggacgacagagcaagaccctgtattaaaaaaaaaattcatcctgcacagggaaatggctacctattaaagtcccagttgaaattttttgaaaaaatacacctcccacagttcacaaataacttttaagatcagctcatctataaggctgaccttcatgcagagattttatttcacctttagttttgggaaaagcgagaaacagatgatctataggatgtgagtgggtggcagagtcaaaaggaacctcacctgttcctaatttctccttttaaatattcatgttgagtgtgcctaatactctcctcgacaagtcatgctgttttatgcagaataatccaggcgtgagagtgttctcttgggaaatgactggggagacacctgaaaggagcaacctccagatgttcttccctgggtgttgatgtcatgacagccatacagtgagtttgttctgaaacatctcttgctaaatgtgggtcatgctagacacagcataaactgagggtgtgggttctggctttgtacataactcattttctcccttgctttttctctggaccatcctggctggaaacttggctgtagacatctgaagagggtgcaccttttctctttactgtgactcacctcaaatatggcattgctcaaatctgctgtgtatgaggtcacagggcccagctgtggcaggggtgagtgcattgaagaagtaggttttggagccttccaggaattccttgttgacaacaggggtacactcacacagacctccaagactttcttctccacctcttctttttctcatgccctgccttcatctgtctccttctgcacccagagtaggggtggagtatacccttgccatgtgttagtgaaaatgtgtgcagtgagaagccagttgggtcccctcggctcctaatctcttctcaaaactcagtagctcaggttctctggagccatccggtgcattccttgctattggagctgtttttccaagcaatatctgggaagagatttctccctctagcacttgctacctctcttctgcacacatatcacacatcagtactgtggagagtttctgttaggaaaagccatacatttttaaaaatgtagcaaaatgtcaagggaaatgtaatcagatttggccagagttcgcctacagataagaaggcactgggccaggctcacacctgtaatcctaagtaacactttgggaggctggggcgagaggattgcttgagcccaggagttcaatacctgtctgggaaacacctcatctctacaaaatacaaaaaagttaactgggcatggtggagcatgcctgtagtctcagctactcaggaggctgagatgagaggatcacttgagcctgaggaggtccaggccacagtgatctgagatcacaccattgccctccagcctgggtgacagagtgagaccctgttccaaaaaaaaaaaaaaacccaaaaaacctcaatggctttttgcttttgaaggtggtatgaagagaacgtccactttaaggctttaaaagacagtgaagctggttgtagggctcacttttataatcctaggatttggggaagctgaagcagaaagattgcttgagcctgggagtttgagactggcctgggcagcatagcgagaccccatctctatataaaaaaaaagatgttaaaacagtgaaattacagaaacagaacatagccaccctgtttcatcagtgaccttttcttcacgtgacggtcaactcagtaggtgagaataattagtaggttcagcagaataaactctttacaattaataactcagtggaaaatgatgttcagatggtgaaatgtggaaatgttttagacaactctattttcagcctgtgcttctcactcaccatcctgttgggattaacagttgagggccatcgctgcctaaacatttagcgtgcggtttcccatcagttttactgtgaatgtgaaaaggtgaaactgttgctgacttcggcagcaggtatactaaaattggaatgacacagaggagattagcatggccccctgcgcgaggaagatccgcagattcatgcagcattccatatttttttaaaaaaaggttacactgtgcaccgacgtggagctagaaggaaaagcatgaagtctcatgtttgctgactataaaaataaatcatagtaataatattattgaacattctactttaaaaattattaataaaaccataaatgaaacacttgagcacactttaaaaagtacataaacccatgagtccatatgtgtaattttatgttgtctgttttattatccaggatttcatactcagatgagcattagcatcaggaaagcctgaaatgccttaattgtgaactgatacgcaggaaaatgaaatatgtaagcacattggtgaccttgttctttacagacatcatgatcagcctccagccatacagaacaaatgagaaattagaagcaattccaagaacgtgtgatggtgtgaaacccacttttgaccgtcacacacatttcagcatttgaagagacacaggctacctggaaactgcccatggcggggtcataatttaaatgtcccaatgtcatatagaggttaatttaatcaaaatgagctaaaacatggaacaatcactgaataatttaaaaagagtttacctggcagagtgtgtcatgcctgcaatcccagcactttgggaggccaaggcaggcagatcacctgaggtcaggagtttgagaccagcctggccaacatgatgaaacccttgtctctattaaaaacacaaaaattagccagatgtggtggcacatgcctgtaatcccagttagtcgggaggctgaggcaggagaatatggaactcaggaggcggaggctgcagtcaaccaagattgcgccactgcactccagccagggcgaaggagtgagactcccatctcaaaaaataaaaaaaaaaataaataaaaatagttgacccgggtgggcattccaaaatgttcccatagatgatcgtgaaacaatcactgtgcaaaatgtagaggaaaattcttacgataatcacaaaatttgtatcagaaaaacattacaaatttactttgctccatgtaattttatgaattggcagtattttcttaaattgggatacagtaagagaatatctttaggaaatggaaatgttaaaacaagaagtaacaagaggttgtttttctgaagggaaatgccaccggcctgctttcataggcattgataaagccaggaaggaaataaagtcacaaccgaatagtatacactgtatctactgaattcttctaattccttcacaacagaagtctaaatcctgcttagcctaaacatatctatagccagcgatgggcaaattatatttgctgtcagcatgatggaataagaaacagaaaccccccagcagtggggtaagattgcacgcttcatcccctcaaaatgcagttcagccccactccctctccatgcccatcaaacaactgcaaaatcacttgttactgaatttctcattcagcgttttgtttctttctgtccatacttaaagaccaaattatttgtttgctttgaagaaaaagcaaaagcaacaaaaacaccaaatcatttgaaatcactacccattaaaaaaaatcaccagtggaactaaacagttgagtggtttgggatgtgttgttcgccatttctgtgtttgacctacatggtctctagttctttggacaattgtaactgtgaaactatggcttaacactgttaaagactccaaggctccactctgtagccaggtgcaactcaggctgcacaaataccccaccagaatgtcacaatcattcattgctccagctgctgagtgaacagagtgcaagacagcactggcttgggttttatttttgcagccagttaactttgcatcaggtctacacagtccttgcagcctttgatttctccagttgtacagatttgaaatggggtgcccgggttcctctcgtttttccttcaatctacctagcatgcattttacacacattggaggagtcgtatgcactgtttttctcttgctgatggaggcaagaacgccttctaattagtataacttaaatggacgggattcacttaaaagcaagaagaaaagcacatgaacaggtgtcttaatgcatttggatactttggggtgtgtgcctgtctgtgtgtgtgtcttggtgaaggtgggctgtattttcaccaagccttttcataatcaagtttgctttgcaaaccatctggccttgcccccagcagtacagtccttcctaataacggggatgctctgtcatgtttctctgtaaattgttgtgtgttgggaagttctgttgaggcttagtttgatcttccatggtggacatgtctgttctgtatataaaaagcattacatctgtgttttagcaggtgggatttgaagcttttccacagtccttgtgctctgagatggctgttgagctctgctcagctgtcacagctgaattctttttttgtgctgaacactgggcagcctcaccttgttgccaacgtgcttctggggcccctgtgactgctgccggatgctgtgcacacaggcagagtgccttggcaggtttgtgcaccccttggcgagccagaactgggaaccccgcggagtgaccccaccttctcatggggggtcagggaggggagtgcctatttttaatcttgtttgttgcgcaatggaaatcactgtgatttgtacatatgccctaggaaaattttaccgctgtctaatttatgtaataatactgatgattctaggtttgtttaataaaactttatatcttttcagaa

SEQ ID NO: 263 - DNA, 2763 bp, Homo sapiens
tgggacaggcagctccggggtccgcggtttcacatcggaaacaaaacagcggctggtctggaaggaacctgagctacgagccgcggcggcagcggggcggcggggaagcgtatacctaatctgggagcctgcaagtgacaacagcctttgcggtccttagacagcttggcctggaggagaacacatgaaagaaagaacctcaagaggctttgttttctgtgaaacagtatttctatacagttgctccaatgacagagttacctgcaccgttgtcctacttccagaatgcacagatgtctgaggacaaccacctgagcaatactgtacgtagccagaatgacaatagagaacggcaggagcacaacgacagacggagccttggccaccctgagccattatctaatggacgaccccagggtaactcccggcaggtggtggagcaagatgaggaagaagatgaggagctgacattgaaatatggcgccaagcatgtgatcatgctctttgtccctgtgactctctgcatggtggtggtcgtggctaccattaagtcagtcagcttttatacccggaaggatgggcagctaatctataccccattcacagaagataccgagactgtgggccagagagccctgcactcaattctgaatgctgccatcatgatcagtgtcattgttgtcatgactatcctcctggtggttctgtataaatacaggtgctataaggtcatccatgcctggcttattatatcatctctattgttgctgttctttttttcattcatttacttgggggaagtgtttaaaacctataacgttgctgtggactacattactgttgcactcctgatctggaattttggtgtggtgggaatgatttccattcactggaaaggtccacttcgactccagcaggcatatctcattatgattagtgccctcatggccctggtgtttatcaagtacctccctgaatggactgcgtggctcatcttggctgtgatttcagtatatgatttagtggctgttttgtgtccgaaaggtccacttcgtatgctggttgaaacagctcaggagagaaatgaaacgctttttccagctctcatttactcctcaacaatggtgtggttggtgaatatggcagaaggagacccggaagctcaaaggagagtatccaaaaattccaagtataatgcagaaagcacagaaagggagtcacaagacactgttgcagagaatgatgatggcgggttcagtgaggaatgggaagcccagagggacagtcatctagggcctcatcgctctacacctgagtcacgagctgctgtccaggaactttccagcagtatcctcgctggtgaagacccagaggaaaggggagtaaaacttggattgggagatttcattttctacagtgttctggttggtaaagcctcagcaacagccagtggagactggaacacaaccatagcctgtttcgtagccatattaattggtttgtgccttacattattactccttgccattttcaagaaagcattgccagctcttccaatctccatcacctttgggcttgttttctactttgccacagattatcttgtacagccttttatggaccaattagcattccatcaattttatatctagcatatttgcggttagaatcccatggatgtttcttctttgactataacaaaatctggggaggacaaaggtgattttcctgtgtccacatctaacaaagtcaagattcccggctggacttttgcagcttccttccaagtcttcctgaccaccttgcactattggactttggaaggaggtgcctatagaaaacgattttgaacatacttcatcgcagtggactgtgtccctcggtgcagaaactaccagatttgagggacgaggtcaaggagatatgataggcccggaagttgctgtgccccatcagcagcttgacgcgtggtcacaggacgatttcactgacactgcgaactctcaggactaccgttaccaagaggttaggtgaagtggtttaaaccaaacggaactcttcatcttaaactacacgttgaaaatcaacccaataattctgtattaactgaattctgaacttttcaggaggtactgtgaggaagagcaggcaccagcagcagaatggggaatggagaggtgggcaggggttccagcttccctttgattttttgctgcagactcatcctttttaaatgagacttgttttcccctctctttgagtcaagtcaaatatgtagattgcctttggcaattcttcttctcaagcactgacactcattaccgtctgtgattgccatttcttcccaaggccagtctgaacctgaggttgctttatcctaaaagttttaacctcaggttccaaattcagtaaattttggaaacagtacagctatttctcatcaattctctatcatgttgaagtcaaatttggattttccaccaaattctgaatttgtagacatacttgtacgctcacttgccccagatgcctcctctgtcctcattcttctctcccacacaagcagtctttttctacagccagtaaggcagctctgtcgtggtagcagatggtcccattattctagggtcttactctttgtatgatgaaaagaatgtgttatgaatcggtgctgtcagccctgctgtcagaccttcttccacagcaaatgagatgtatgcccaaagcggtagaattaaagaagagtaaaatggctgttgaagc

SEQ ID NO: 264 - DNA, 4453 bp, Homo sapiens
gaccactgtgagcccgcggcgtgaggcgtgggaggaagcgcggctgctgtcgcccagcgccgccccgtcgtcgtctgccttcgcttcacggcgccgagccgcggtccgagcagaactggggctcccttgcatcttccagttacaaattcagtgccttctgcagtttccccagagctcctcaagaataacggaagggagaatatgacagatacctagcatctagcaaaataatggcagctgcttaccttgaccccaacttgaatcacacaccaaattcgagtactaagactcacctgggtactggtatggaacgttctcctggtgcaatggagcgagtattaaaggtctttcattattttgaaagcaatagtgagccaaccacctgggccagtattatcaggcatggagatgctactgatgtcaggggcatcattcagaagatagtggacagtcacaaagtaaagcatgtggcctgctatggattccgcctcagtcacctgcggtcagaggaggttcactggcttcacgtggatatgggcgtctccagtgtgagggagaagtatgagcttgctcacccaccagaggagtggaaatatgaattgagaattcgttatttgccaaaaggatttctaaaccagtttactgaagataagccaactttgaatttcttctatcaacaggtgaagagcgattatatgttagagatagctgatcaagtggaccaggaaattgctttgaagttgggttgtctagaaatacggcgatcatactgggagatgcggggcaatgcactagaaaagaagtctaactatgaagtattagaaaaagatgttggtttaaagcgattttttcctaagagtttactggattctgtcaaggccaaaacactaagaaaactgatccaacaaacatttagacaatttgccaaccttaatagagaagaaagtattctgaaattctttgagatcctgtctccagtctacagatttgataaggaatgcttcaagtgtgctcttggttcaagctggattatttcagtggaactggcaatcggcccagaagaaggaatcagttacctaacggacaagggctgcaatcccacacatcttgctgacttcactcaagtgcaaaccattcagtattcaaacagtgaagacaaggacagaaaaggaatgctacaactaaaaatagcaggtgcacccgagcctctgacagtgacggcaccatccctaaccattgcggagaatatggctgacctaatagatgggtactgccggctggtgaatggaacctcgcagtcatttatcatcagacctcagaaagaaggtgaacgggctttgccatcaataccaaagttggccaacagcgaaaagcaaggcatgcggacacacgccgtctctgtgtcagaaacagatgattatgctgagattatagatgaagaagatacttacaccatgccctcaaccagggattatgagattcaaagagaaagaatagaacttggacgatgtattggagaaggccaatttggagatgtacatcaaggcatttatatgagtccagagaatccagctttggcggttgcaattaaaacatgtaaaaactgtacttcggacagcgtgagagagaaatttcttcaagaagccttaacaatgcgtcagtttgaccatcctcatattgtgaagctgattggagtcatcacagagaatcctgtctggataatcatggagctgtgcacacttggagagctgaggtcatttttgcaagtaaggaaatacagtttggatctagcatctttgatcctgtatgcctatcagcttagtacagctcttgcatatctagagagcaaaagatttgtacacagggacattgctgctcggaatgttctggtgtcctcaaatgattgtgtaaaattaggagactttggattatcccgatatatggaagatagtacttactacaaagcttccaaaggaaaattgcctattaaatggatggctccagagtcaatcaattttcgacgttttacctcagctagtgacgtatggatgtttggtgtgtgtatgtgggagatactgatgcatggtgtgaagccttttcaaggagtgaagaacaatgatgtaatcggtcgaattgaaaatggggaaagattaccaatgcctccaaattgtcctcctaccctctacagccttatgacgaaatgctgggcctatgaccccagcaggcggcccaggtttactgaacttaaagctcagctcagcacaatcctggaggaagagaaggctcagcaagaagagcgcatgaggatggagtccagaagacaggccacagtgtcctgggactccggagggtctgatgaagcaccgcccaagcccagcagaccgggttatcccagtccgaggtccagcgaaggattttatcccagcccacagcacatggtacaaaccaatcattaccaggtttctggctaccctggttcacatggaatcacagccatggctggcagcatctatccaggtcaggcatctcttttggaccaaacagattcatggaatcatagacctcaggagatagcaatgtggcagcccaatgtggaggactctacagtattggacctgcgagggattgggcaagtgttgccaacccatctgatggaagagcgtctaatccgacagcaacaggaaatggaagaagatcagcgctggctggaaaaagaggaaagatttctgaaacctgatgtgagactctctcgaggcagtattgacagggaggatggaagtcttcagggtccgattggaaaccaacatatatatcagcctgtgggtaaaccagatcctgcagctccaccaaagaaaccgcctcgccctggagctcccggtcatctgggaagccttgccagcctcagcagccctgctgacagctacaacgagggtgtcaagcttcagccccaggaaatcagcccccctcctactgccaacctggaccggtcgaatgataaggtgtacgagaatgtgacgggcctggtgaaagctgtcatcgagatgtccagtaaaatccagccagccccaccagaggagtatgtccctatggtgaaggaagtcggcttggccctgaggacattattggccactgtggatgagaccattcccctcctaccagccagcacccaccgagagattgagatggcacagaagctattgaactctgacctgggtgagctcatcaacaagatgaaactggcccagcagtatgtcatgaccagcctccagcaagagtacaaaaagcaaatgctgactgctgctcacgccctggctgtggatgccaaaaacttactcgatgtcattgaccaagcaagactgaaaatgcttgggcagacgagaccacactgagcctcccctaggagcacgtcttgctaccctcttttgaagatgttctctagccttccaccagcagcgaggaattaaccctgtgtcctcagtcgccagcacttacagctccaacttttttgaatgaccatctggttgaaaaatctttctcatataagtttaaccacactttgatttgggttcattttttgttttgtttttttcaatcatgatattcagaaaaatccaggatccaaaatgtggcgtttttctaagaatgaaaattatatgtaagcttttaagcatcatgaagaacaatttatgttcacattaagatacgttctaaagggggatggccaaggggtgacatcttaattcctaaactaccttagctgcatagtggaagaggagagcatgaagcaaagaattccaggaaacccaagaggctgagaattcttttgtctaccatagaattattatccagactggaatttttgtttgttagaacacccttcagttgcaatatgctaatcccactttacaaagaatataaaagctatattttgaagacttgagttatttcagaaaaaactacagccctttttgtcttacctgccttttactttcgtgtggatatgtgaagcattgggtcgggaactagctgtagaacacaactaaaaactcatgtcttttttcacagaataatgtgccagttttttgtagcaatgttatttctcttggaagcagaaatgctttgtaccagagcacctccaaactgcattgaggagaagttccagaaccatcccctttttccatttttatataatttataaagaaagattaaagccatgttgactattttacagccactggagttaactaacccttccttgtatctgtcttcccaggagagaatgaagcaaaacaggaatttggttttcttttgatgtccagttacaccatccattctgttaattttgaaaaaatataccctccctttagtttgttgggggatataaattattctcaggaagaatataatgaactgtacagttactttgacctattaaaaaggtgttaccagtaaa

SEQ ID NO: 265 - DNA, 3595 bp, Homo sapiens
aaaagttgcggggcatagacgagcgccccgggacgcagctagcgcgaccctgagccggcgcccgtggtccggccatggacgacctcgacgccctgctggcggacttggagtctaccacctcccacatctccaaacggcctgtgttcttgtcggaggagaccccctactcatacccaactggaaaccacacataccaggagattgccgtgccaccccccgtccccccacccccgtccagcgaggccctcaatggcacaatccttgaccccttagaccagtggcagcccagcggctcccgattcatccaccagcagcctcagtcctcatcacctgtgtacggctccagtgccaaaacttccagtgtctccaaccctcaggacagtgttggctctccgtgctcccgagtgggtgaggaggagcacgtctacagcttccccaacaagcagaaatcagctgagccttcacccaccgtaatgagcacgtccctgggcagcaacctttctgaactcgaccgcctgctgctggaactgaacgctgtacagcataacccgccaggcttccctgcagatgaggccaactcaagccccccgcttcctggggccctgagccccctctatggtgtcccagagactaacagccccttgggaggcaaagctgggcccctgacgaaagagaagcctaagcggaatgggggccggggcctggaggacgtgcggcccagtgtggagagtctcttggatgaactggagagctccgtgcccagccccgtccctgccatcactgtgaaccagggcgagatgagcagcccgcagcgcgtcacctccacccaacagcagacacgcatctcggcctcctctgccaccagggagctggacgagctgatggcttcgctgtcggatttcaagttcatggcccaggggaagacagggagcagctcaccccctggggggcccccgaagcccgggagccagctggacagcatgctggggagcctgcagtctgacctgaacaagctgggggtcgccacagtcgccaaaggagtctgcggggcctgcaagaagcccatcgccgggcaggttgtgaccgccatggggaagacgtggcaccccgagcacttcgtctgcacccactgccaggaggagatcggatcccggaacttcttcgagcgggatggacagccctactgtgaaaaggactaccacaacctcttctccccgcgctgctactactgcaacggccccatcctggataaagtggtgacagcccttgaccggacgtggcaccctgaacacttcttctgtgcacagtgtggagccttctttggtcccgaagggttccacgagaaggacggcaaggcctactgtcgcaaggactacttcgacatgttcgcacccaagtgtggcggctgcgcccgggccatcctggagaactatatctcagccctcaacacgctgtggcatcctgagtgctttgtgtgccgggaatgcttcacgccattcgtgaacggcagcttcttcgagcacgacgggcagccctactgtgaggtgcactaccacgagcggcgcggctcgctgtgttctggctgccagaagcccatcaccggccgctgcatcaccgccatggccaagaagttccaccccgagcacttcgtctgtgccttctgcctcaagcagctcaacaagggcaccttcaaggagcagaacgacaagccttactgtcagaactgcttcctcaagctcttctgctaggtgccctgcccctgtctctgccccccttccccagccagcatccccaactgcgactgtgacctagagacttcacccgggggtgaaggggtaaacccgactgaaactggaacccttgtcctccgctggtgcgggatggacagagggccgtgaggggtccccctgcttgtcttcacccctgccagagcctctgggccccctcctccctcctgtagctctccctaggctgcccactctccatcctccccaggggtagaggctgggggctccaccccagcccatgtacgtccccacgaactggcctggccagcaccccacactggagccatctcttcctcatatttcagcagtgcagccggggggcagggaagggcaggcagggtctgttggggtctctttttatccttattcctcccccgacctaattgtctttgttctgtgattattgggggacacccggctccctccagacaatgccagcataaatccatccatccaaaggcagagaaccaaaggggccatggaaggttctctgtgctcctcctacccttccagtgccctaggcctggcgactgcccctgccttttagacccgcactccccttttatacctgctcttgttctactgagaaaagcctctccagcaataatgttttctagtcacttcctccgtctccgggacggcgtgcctggacactgtccgactttgatagatttctacactgaggttgaattcatatcgcctgagatgttttacttctctatacaccatgattttgtagagatattaaagacgttcccttttgtatctcttcttcatcaccgccactgggccttcactgatggtgtctggtgtgtagattgctttgtctgtggggtggggtggggaagcaatatgtattttattgtttcttagcacaagcaggtgtgctgggagcagctctgtgactccccctctttcacttcatagctcccaggactgttttataaactgctgctatttggaaaccccttctttacttcccaggccagcaagccttcactgaaactggttgaagagtgttgcacccttttgggcctagaattctgaactttatctgttctgtttctgtgggaggagaaggggaagtatgttttggggggctgcttcctgtctgagtaagccctcaggagcctcttgctcccctgtgaacccctgaaccttctgagcccccctgcttctatggggctctctcttctgccttctcaggaaagctgtgtctgattttggccatcaggactctgacgtctctttggtcttgttgatttacctctgggcatatcccttccccagatctgctcctcccctttcacaggtgggatcggcactcagggggtctggaaagaaggtcataagggagcatgataggatttggggcagagggacaggctcctctggggaaaccccccagagctctttaccaaggatgaaagaggagccaggccttgggctcctgatgaccagaaaggggccaccggggtctaatggtgacagtccaaaccactccactggcctcctggcagaagccgagtgtgctggggtctccgaagagggtccctcctttttgggggaaggtcagcccagcccctccaaaggtctgatgtctccactttcacccgcaggccttaccgctctgtttatagtgacccaccctagatcttccccaagagggactggggtttctggggtccattctctgagtcagtggttatttgaaaatttgattttgattttattttttctctgtaaacttccaagctggcttttcccatttcaattcctgtgatttatgccaataaagtttgcccatg

SEQ ID NO: 266 - DNA, 1260 bp, Homo sapiens
atgcccgccgagaactctccagctcccgcttacaaagtttcctcgcatggtggtgatagtggactggatgggttaggaggaccaggtgtacaactaggaagcccagataagaaaaagcgcaaggcaaatacacagggaccttctttccctccattgtctgagtatgctccaccaccgaatccaaactctgaccatctagtggctgctaatccatttgatgacaactataatactatttcctataaaccactaccttcgtcaaatccatatcttggccctggttatcctggctttggaggctatagtacattcagaatgccacctcacgttcccccaagaatgtcttccccatactgtggtccttactcactcaggaaccagccacacccatttcctcagaatcctctgggcatgggttttaatcgacctcatgcttttaactttgggccacatgataattcaagtttcggtaatccatcttataataatgcactaagtcagaatgtcaacatgcctaatcaacattttagacaaaatcctgctgaaaatttcagtcaaattcctccacagaatgctagccaagtttctaaccccgatttggcatctaattttgttcctggaaataattcaaattttacttctccgttagaatctaatcattcttttattcctcccccaaacacttttggtcaagcaaaagcaccacccccaaaacaagactttactcaaggagcaaccaaaaacactaatcaaaattcctctgctcatccacctcacttgaatatggatgacacagtgaatcagagtaatattgaattaaaaaatgttaatcgaaacaatgcagtaaatcaggagaacagccgttcaagtagcactgaagccacaaacaataaccctgcaaatgggacgcagaataagccacgacaaccaagaggtgcagcagatgcctgcaccacagaaaaaagcaataaatcctctcttcacccaaaccgtcatggccattcgtcttctgacccagtgtatccttgtggaatttgtacaaacgaggtgaacgatgatcaggatgccatcttatgtgaggcctcttgtcagaaatggtttcatcggatctgtactggaatgactgaaacagcttatggcctcttaactgcagaagcatctgcagtatggggctgtgatacctgtatggctgacaaagatgtccagttaatgcgtactagagaaacttttggtccatctgcagtgggcagtgatgcttaa

SEQ ID NO: 267 - DNA, 3227 bp, Homo sapiens
ggttccggttgctgccgccgctggcgggcggcgagtctggagagagcgcgcagtttgcgcggcggctcggcgcttccctgtcgtcgcactttgtggttgctgcagctcgggggcctgggctgcccctgacaccccttctgggcgatggtgcagcccaagggcgcctccatcccccgccgctgccgctaacccgggtcccccactccatggccgcctcggcgccgcccccaccggacaagctggagggaggtggcggccccgcaccgccccctgcgccgcccagcaccgggaggaagcagggcaaggccggtctgcaaatgaagagtccagaaaagaagcgaaggaagtcaaatactcagggccctgcatactcacatctgacggagtttgcaccacccccaactcccatggtggatcacctggttgcatccaacccttttgaagatgacttcggagcccccaaagtgggggttgcagcccctccattccttggcagtcctgtgcccttcggaggcttccgtgtgcaggggggcatggcgggccaggtacccccaggctacagcactggaggtggagggggcccccagccactccgtcgacagccaccccccttccctcccaatcctatgggccctgctttcaacatgcccccccagggtcctggctacccacccccaggcaacatgaactttcccagccaacccttcaaccagcctctgggtcaaaactttagtcctcccagtgggcagatgatgccgggcccagtggggggatttggtcccatgatctcacccaccatgggacagcctcccagagcagagctgggcccaccttctctgtcccaacgatttgctcagccaggggctccttttggcccttctcctctccagagacctggtcaggggctccccagcctgccgcctaacacaagtccctttcctggtccggaccctggctttcctggccctggtggtgaggatggggggaagcccttgaatccacctgcttctactgcttttccccaggagccccactcaggctccccggctgctgctgttaatgggaaccagcccagtttccccccgaacagcagtgggcggggtgggggcactccagatgccaacagcttggcaccccctggcaaggcaggtgggggctccgggccccagcctcccccaggcttggtgtacccatgtggtgcctgtcggagtgaggtgaacgatgaccaggatgccattctgtgtgaggcctcctgccagaaatggttccaccgtgagtgcacaggcatgactgagagcgcctatgggctgctgaccactgaagcttctgccgtctgggcctgcgatctctgcctcaagaccaaggagatccagtctgtctacatccgtgagggcatggggcagctggtggctgctaacgatgggtgacgctggtgaagtggcccagggaagtgcacatgtctctccctgctcttccagggtgatttttttgatgtttggctcttggtccttgtttccactggctttccatccccatggggcagaaacagtggctcctgggagcagaaaaggaattgaggtgggcaggcagaagagcctggattgctcactgttttgggaaacttacatgttgagatctacagagatccaggaaaccaaagccctgctgagcagagccattttgtggctatttctggaggcccaggagtgtggctgcaagagaaaaggggctggaggaagatccggagggcaggggtgttccctctgctgatgatggatgcccctaacacctgtgcctaacacccctactgaaccccacagctccagccttagtttttggagtcaagtgttaaaggtttctggccagaggaattggggtcttgccatccctgcaatagcccttttatgggctctgggagacagctttagggaataaatggggattttcccctttttctacccactcctttgcttcctccaagacttacccaactccttccccctcagagaaccaaatagcctgaggaagcaggagagttcctggttatggcagtttcttggtgatttggggcttcaagacagtaggtgagagatgctgtcaggacgtatcttcttcataccaaagtcactggtcctttctcagcctctctcgtgcttttctcctaatgaccatatttttgccaaaaattgggatatgttatctgacagaccagaatatttgaagtttgggctgtcctgaaagtctggactttggtggtaccctcctcccccagcccatctgttgcacattatactccgtgtgttcttcaactttcggcgcccttattcccctgccttcctggcttgattgaaggaaagcttgaaaaggcgcagagccctatacctcatttcctccatgataaaaggatccaagtgaggccctgtcacagcctgtgggtaggggatgcggcgggatcctcattgccatggtactcaaaggtagaagagcctggagtttgttgcttctctttgctattctttcatatcctcttgggcctggtgattaattagcaattctcattcctctcagccaaaggcctgcactgggctttatttgtctttttttattttttaagcactgcctgccagagatgggcctggggcctgatgaggaccttagcgctgctcgttctccttttctgttcatgcacacattcctccatggggtggggaaggcaggcatggggtgtggccctcggagaagttaggagtcccccagctcaagatacagtggcaaagacctagtggtcccctacccccacttctctcagttcctggcatgaggagagaagaccctgctctggtggagctgacaacctttgaggctgggaggagagcagcctctgggcatcgttcccagtgtccctcacactaaaacggcgtagatggcaaccccccacccccaccccgctgctcaactcttgtgtttgttgttctgtttgccccatttatctgttgctgtttttgtgttgtcttcccctgctccgcattttgtaaaatggcccctgggggagtgtttttgctggatctgctccctctcgctctctcactccactactttttggaacaaagtgatggcagaatgcggtggtggtgggggtcttttgtactgttggattaataaaatgattttaaaatcccaaaaaaaaaaaaaaaaaaaaaaaaaaaaaaaaaaaaaaaaaaaaaaaa

SEQ ID NO: 268 - DNA, 2341 bp, Homo sapiens
gggaggccggatgtgagtggagcggccatttcctgtttctctgcagttttcctcagctttgggtggtggccgctgccgggcatcggcttccagtccgcggagggcgaggcggcgtggacagcggccccggcacccagcgccccgccgcccgcaagccgcgcgcccgtccgccgcgccccgagcccgccgcttcctatctcagcgccctgccgccgccgccgcggcccagcgagcggccctgatgcaggccatcaagtgtgtggtggtgggagacggagctgtaggtaaaacttgcctactgatcagttacacaaccaatgcatttcctggagaatatatccctactgtctttgacaattattctgccaatgttatggtagatggaaaaccggtgaatctgggcttatgggatacagctggacaagaagattatgacagattacgccccctatcctatccgcaaacagatgtgttcttaatttgcttttcccttgtgagtcctgcatcatttgaaaatgtccgtgcaaagtggtatcctgaggtgcggcaccactgtcccaacactcccatcatcctagtgggaactaaacttgatcttagggatgataaagacacgatcgagaaactgaaggagaagaagctgactcccatcacctatccgcagggtctagccatggctaaggagattggtgctgtaaaatacctggagtgctcggcgctcacacagcgaggcctcaagacagtgtttgacgaagcgatccgagcagtcctctgcccgcctcccgtgaagaagaggaagagaaaatgcctgctgttgtaaatgtctcagcccctcgttcttggtcctgtcccttggaacctttgtacgctttgctcaaaaaaaaacaaaaaaaaaaaacaaaaaaaaaaaacaacggtggagccttcgcactcaatgccaactttttgttacagattaatttttccataaaaccattttttgaaccaatcagtaattttaaggttttgtttgttctaaatgtaagagttcagactcacattctattaaaatttagccctaaaatgacaagccttcttaaagccttatttttcaaaagcgccccccccattcttgttcagattaagagttgccaaaataccttctgaactacactgcattgttgtgccgagaacaccgagcactgaactttgcaaagaccttcgtctttgagaagacggtagcttctgcagttaggaggtgcagacacttgctctcctatgtagttctcagatgcgtaaagcagaacagcctcccgaatgaagcgttgccattgaactcaccagtgagttagcagcacgtgttcccgacataacattgtactgtaatggagtgagcgtagcagctcagctctttggatcagtctttgtgatttcatagcgagttttctgaccagcttttgcggagattttgaacagaactgctatttcctctaatgaagaattctgtttagctgtgggtgtgccgggtggggtgtgtgtgatcaaaggacaaagacagtattttgacaaaatacgaagtggagatttacactacattgtacaaggaatgaaagtgtcacgggtaaaaactctaaaaggttaatttctgtcaaatgcagtagatgatgaaagaaaggttggtattatcaggaaatgttttcttaagcttttcctttctcttacacctgccatgcctccccaaattgggcatttaattcatctttaaactggttgttctgttagtcgctaacttagtaagtgcttttcttatagaaccccttctgactgagcaatatgcctccttgtattataaaatctttctgataatgcattagaaggtttttttgtcgattagtaaaagtgctttccatgttactttattcagagctaataagtgctttccttagttttctagtaactaggtgtaaaaatcatgtgttgcagctttatagtttttaaaatattttagataattcttaaactatgaaccttcttaacatcactgtcttgccagattaccgacactgtcacttgaccaatactgaccctctttacctcgcccacgcggacacacgcctcctgtagtcgctttgcctattgatgttcctttgggtctgtgaggttctgtaaactgtgctagtgctgacgatgttctgtacaacttaactcactggcgagaatacagcgtgggacccttcagccactacaacagaattttttaaattgacagttgcagaattgtggagtgtttttacattgatcttttgctaatgcaattagcattatgttttgcatgtatgacttaataaatccttgaatcata

SEQ ID NO: 269 - DNA, 1516 bp, Homo sapiens
tgccccaccaccgctgctcctcagcaggcgcctcaccagcctccacaccccttgcgcccgcagaaacgcgcctggccctgagctgtcaccaccgacactctccaggctccggacacgatgcaggccatcaagtgtgtggtggtgggagatggggccgtgggcaagacctgccttctcatcagctacaccaccaacgcctttcccggagagtacatccccaccgtgtttgacaactattcagccaatgtgatggtggacagcaagccagtgaacctggggctgtgggacactgctgggcaggaggactacgaccgtctccggccgctctcctatccacagacggacgtcttcctcatctgcttctccctcgtcagcccagcctcttatgagaacgtccgcgccaagtggttcccagaagtgcggcaccactgccccagcacacccatcatcctggtgggcaccaagctggacctgcgggacgacaaggacaccatcgagaaactgaaggagaagaagctggctcccatcacctacccgcagggcctggcactggccaaggagattgactcggtgaaatacctggagtgctcagctctcacccagagaggcctgaaaaccgtgttcgacgaggccatccgggccgtgctgtgccctcagcccacgcggcagcagaagcgcgcctgcagcctcctctaggggttgcaccccagcgctcccacctagatgggtctgatcctccaggatccccacccaaagcctgatggcaccccggctggccatgctgtcccctccctgtggcgtttcttagcagatggctgcagagcttcgttgatggtcttttctgtactggaggcctcctgaggccaggaacgtgcaaatttgcaggtgctgcatcccaagcccctcatgctcctgccttcctgagggccagaggggagccccaggacccattaagccacccccgtgttcctgccgtcagtgccaactgccgcatgtggaagcatctacccgttcactccagtcccaccccacgcctgactcccctctggaaactgcaggccagatggttgctgccacaacttgtgtaccttcagggatggggctcttactccctcctgaggccagctgctctaatatcgatggtcctgcttgccagagagttcctctacccagcaaaaatgagtgtctcagaagtgtgctcctctggcctcagttctcctcttttggaacaacataaaacaaatttaattttctacgcctctggggatatctgctcagccaatggaaaatctgggttcaaccagcccctgccatttcttaagactttctgctgcactcacaggatcctgagctgcacttacctgtgagagtcttcaaacttttaaaccttgccagtcaggacttttgctattgcaaatagaaaacccaactcaacctgcttaagcagaaaataaatttattgattcaaaaaaaaaaaaaaaaaaaaaaaaaaaaaaaaaaaaaaaaaaaaaaaaaa

SEQ ID NO: 270 - DNA, 1077 bp, Homo sapiens
tgtctccggccgatcgctcggcgctcgggtccgcggccgctgcggcgccgggcatttctccgcagctcggctcgcggccgcgcccgccgccgcccggcccgcgcccatgcaggccatcaagtgcgtggtggtcggcgacggcgccgtggggaagacatgcttgctgatcagctacacgaccaacgccttccccggagagtacatccccaccgtttttgacaactactctgccaacgtgatggtggacgggaaaccagtcaacttggggctgtgggacacagcgggtcaggaggactacgatcggctgcggccactctcctacccccaaactgacgtctttctgatctgcttctctctggtgagcccggcctccttcgagaatgttcgtgccaagtggtacccggaggtgcggcaccactgcccccacacgcccatcctcctggtgggcaccaagctggacctccgcgacgacaaggacaccattgagcggctgcgggacaagaagctggcacccatcacctacccacagggcctggccatggcccgggagattggctctgtgaaatacctggagtgctcagccctgacccagcggggcctgaagacagtgtttgacgaggcgatccgcgcggtgctctgcccgcccccagtgaagaagccggggaagaagtgcaccgtcttctagagccctggcccacccgagcctgagggctggcggggagcagccctggacgtgtccgctgttgtgttgagacgtgtggtgtccctgagtcggctgtggggagcggtgggggtgggccggggggaagcatggggatgaggctgggtggcaggatcctgtcctctctgccgcctcattctggggtgtggctccagccttccctggcccccgccggaggccgggagggagcagggtctccctcagggctgcaggggcaggtgcagggaagccccaggatgggcttccctggagggggagggtgggggggagttctgttccttgtgccccgaggtggggcagccccttctcattttatacaataaacattctccacctacaaaaaaaaaaaaaaaaaa

SEQ ID NO: 271 - DNA, 3245 bp, Homo sapiens
cgcaggtcgggaggacgagcaccgagtcgagggctcgctcgtctgggccgcccgagagtcttaatcgcgggcgcttgggccgccatcttagatggcgggagtaagaggaaaacgattgtgaggcgggaacggctttctgctgccttttttgggccccgaaaagggtcagctggccgggctttggggcgcgtgccctgaggcgcggagcgcgtttgctacgatgcgggggctgctcggggctccgtcccctgggctggggacgcgccgaatgtgaccgcctcccgctccctcacccgccgcggggaggaggagcgggcgagaagctgccgccgaacgacaggacgttggggcggcctggctccctcaggtttaagaattgtttaagctgcatcaatggagcacatacagggagcttggaagacgatcagcaatggttttggattcaaagatgccgtgtttgatggctccagctgcatctctcctacaatagttcagcagtttggctatcagcgccgggcatcagatgatggcaaactcacagatccttctaagacaagcaacactatccgtgttttcttgccgaacaagcaaagaacagtggtcaatgtgcgaaatggaatgagcttgcatgactgccttatgaaagcactcaaggtgaggggcctgcaaccagagtgctgtgcagtgttcagacttctccacgaacacaaaggtaaaaaagcacgcttagattggaatactgatgctgcgtctttgattggagaagaacttcaagtagatttcctggatcatgttcccctcacaacacacaactttgctcggaagacgttcctgaagcttgccttctgtgacatctgtcagaaattcctgctcaatggatttcgatgtcagacttgtggctacaaatttcatgagcactgtagcaccaaagtacctactatgtgtgtggactggagtaacatcagacaactcttattgtttccaaattccactattggtgatagtggagtcccagcactaccttctttgactatgcgtcgtatgcgagagtctgtttccaggatgcctgttagttctcagcacagatattctacacctcacgccttcacctttaacacctccagtccctcatctgaaggttccctctcccagaggcagaggtcgacatccacacctaatgtccacatggtcagcaccaccctgcctgtggacagcaggatgattgaggatgcaattcgaagtcacagcgaatcagcctcaccttcagccctgtccagtagccccaacaatctgagcccaacaggctggtcacagccgaaaacccccgtgccagcacaaagagagcgggcaccagtatctgggacccaggagaaaaacaaaattaggcctcgtggacagagagattcaagctattattgggaaatagaagccagtgaagtgatgctgtccactcggattgggtcaggctcttttggaactgtttataagggtaaatggcacggagatgttgcagtaaagatcctaaaggttgtcgacccaaccccagagcaattccaggccttcaggaatgaggtggctgttctgcgcaaaacacggcatgtgaacattctgcttttcatggggtacatgacaaaggacaacctggcaattgtgacccagtggtgcgagggcagcagcctctacaaacacctgcatgtccaggagaccaagtttcagatgttccagctaattgacattgcccggcagacggctcagggaatggactatttgcatgcaaagaacatcatccatagagacatgaaatccaacaatatatttctccatgaaggcttaacagtgaaaattggagattttggtttggcaacagtaaagtcacgctggagtggttctcagcaggttgaacaacctactggctctgtcctctggatggccccagaggtgatccgaatgcaggataacaacccattcagtttccagtcggatgtctactcctatggcatcgtattgtatgaactgatgacgggggagcttccttattctcacatcaacaaccgagatcagatcatcttcatggtgggccgaggatatgcctccccagatcttagtaagctatataagaactgccccaaagcaatgaagaggctggtagctgactgtgtgaagaaagtaaaggaagagaggcctctttttccccagatcctgtcttccattgagctgctccaacactctctaccgaagatcaaccggagcgcttccgagccatccttgcatcgggcagcccacactgaggatatcaatgcttgcacgctgaccacgtccccgaggctgcctgtcttctagttgactttgcacctgtcttcaggctgccaggggaggaggagaagccagcaggcaccacttttctgctccctttctccagaggcagaacacatgttttcagagaagctgctgctaaggaccttctagactgctcacagggccttaacttcatgttgccttcttttctatccctttgggccctgggagaaggaagccatttgcagtgctggtgtgtcctgctccctccccacattccccatgctcaaggcccagccttctgtagatgcgcaagtggatgttgatggtagtacaaaaagcaggggcccagccccagctgttggctacatgagtatttagaggaagtaaggtagcaggcagtccagccctgatgtggagacacatgggattttggaaatcagcttctggaggaatgcatgtcacaggcgggactttcttcagagagtggtgcagcgccagacattttgcacataaggcaccaaacagcccaggactgccgagactctggccgcccgaaggagcctgctttggtactatggaacttttcttaggggacacgtcctcctttcacagcttctaaggtgtccagtgcattgggatggttttccaggcaaggcactcggccaatccgcatctcagccctctcagggagcagtcttccatcatgctgaattttgtcttccaggagctgcccctatggggcggggccgcagggccagccttgtttctctaacaaacaaacaaacaaacagccttgtttctctagtcacatcatgtgtatacaaggaagccaggaatacaggttttcttgatgatttgggttttaattttgtttttattgcacctgacaaaatacagttatctgatggtccctcaattatgttattttaataaaataaattaaattt

SEQ ID NO: 272 - DNA, 3260 bp, Homo sapiens
cagaagcaggggggaatcctgaatcgagctgagagggcttccccggttctcctgggaaccccatcggccccctgccagcacacacctgagcagcatcacaggacatggccccctcagccacctagctggggcccatctaggagtggcatcttttttggtgccctgaaggccagctctggaccttcccaggaaaagtgccagctcacagaactgcttgaccaaaggaccggctcttgagacatcccccaacccacctggcccccagctagggtgggggctccaggagactgagattagcctgccctctttggacagcagctccaggacagggcgggtgggctgaccacccaaaccccatctgggcccaggccccatgccccgaggaggggtggtctgaagcccaccagagccccctgccagactgtctgcctcccttctgactgtggccgcttggcatggccagcaacagcagctcctgcccgacacctgggggcgggcacctcaatgggtacccggtgcctccctacgccttcttcttcccccctatgctgggtggactctccccgccaggcgctctgaccactctccagcaccagcttccagttagtggatatagcacaccatccccagccaccattgagacccagagcagcagttctgaagagatagtgcccagccctccctcgccaccccctctaccccgcatctacaagccttgctttgtctgtcaggacaagtcctcaggctaccactatggggtcagcgcctgtgagggctgcaagggcttcttccgccgcagcatccagaagaacatggtgtacacgtgtcaccgggacaagaactgcatcatcaacaaggtgacccggaaccgctgccagtactgccgactgcagaagtgctttgaagtgggcatgtccaaggagtctgtgagaaacgaccgaaacaagaagaagaaggaggtgcccaagcccgagtgctctgagagctacacgctgacgccggaggtgggggagctcattgagaaggtgcgcaaagcgcaccaggaaaccttccctgccctctgccagctgggcaaatacactacgaacaacagctcagaacaacgtgtctctctggacattgacctctgggacaagttcagtgaactctccaccaagtgcatcattaagactgtggagttcgccaagcagctgcccggcttcaccaccctcaccatcgccgaccagatcaccctcctcaaggctgcctgcctggacatcctgatcctgcggatctgcacgcggtacacgcccgagcaggacaccatgaccttctcggacgggctgaccctgaaccggacccagatgcacaacgctggcttcggccccctcaccgacctggtctttgccttcgccaaccagctgctgcccctggagatggatgatgcggagacggggctgctcagcgccatctgcctcatctgcggagaccgccaggacctggagcagccggaccgggtggacatgctgcaggagccgctgctggaggcgctaaaggtctacgtgcggaagcggaggcccagccgcccccacatgttccccaagatgctaatgaagattactgacctgcgaagcatcagcgccaagggggctgagcgggtgatcacgctgaagatggagatcccgggctccatgccgcctctcatccaggaaatgttggagaactcagagggcctggacactctgagcggacagccggggggtggggggcgggacgggggtggcctggcccccccgccaggcagctgtagccccagcctcagccccagctccaacagaagcagcccggccacccactccccgtgaccgcccacgccacatggacacagccctcgccctccgccccggcttttctctgcctttctaccgaccatgtgaccccgcaccagccctgcccccacctgccctcccgggcagtactggggaccttccctgggggacggggagggaggaggcagcgactccttggacagaggcctgggccctcagtggactgcctgctcccacagcctgggctgacgtcagaggccgaggccaggaactgagtgaggcccctggtcctgggtctcaggatgggtcctgggggcctcgtgttcatcaagacacccctctgcccagctcaccacatcttcatcaccagcaaacgccaggacttggctcccccatcctcagaactcacaagccattgctccccagctggggaacctcaacctcccccctgcctcggttggtgacagagggggtgggacaggggcggggggttccccctgtacataccctgccataccaaccccaggtattaattctcgctggttttgtttttattttaatttttttgttttgatttttttaataagaattttcattttaagcacatttatactgaaggaatttgtgctgtgtattggggggagctggatccagagctggagggggtgggtccgggggagggagtggctcggaaggggcccccactctcctttcatgtccctgtgccccccagttctcctcctcagccttttcctcctcagttttctctttaaaactgtgaagtactaactttccaaggcctgccttcccctccctcccactggagaagccgccagcccctttctccctctgcctgaccactgggtgtggacggtgtggggcagccctgaaaggacaggctcctggccttggcacttgcctgcacccaccatgaggcatggagcagggcagagcaagggccccgggacagagttttcccagacctggctcctcggcagagctgcctcccgtcagggcccacatcatctaggctccccagcccccactgtgaaggggctggccaggggcccgagctgcccccacccccggcctcagccaccagcacccccatagggcccccagacaccacacacatgcgcgtgcgcacacacacaaacacacacacactggacagtagatgggccgacacacacttggcccgagttcctccatttccctggcctgccccccacccccaacctgtcccacccccgtgccccctccttaccccgcaggacgggcctacaggggggtctcccctcacccctgcacccccagctgggggagctggctctgccccgacctccttcaccaggggttggggccccttcccctggagcccgtgggtgcacctgttactgttgggctttccactgagatctactggataaagaataaagttctatttattct

SEQ ID NO: 273 - DNA, 3119 bp, Homo sapiens
gtgacagaagtagtaggaagtgagctgttcagaggcaggagggtctattctttgccaaaggggggaccagaattccccatgcgagctgtttgaggactgggatgccgagaacgcgagcgatccgagcagggtttgtctgggcaccgtcggggtaggatccggaacgcattcggaaggctttttgcaagcatttacttggaaggagaacttgggatctttctgggaaccccccgccccggctggattggccgagcaagcctggaaaatggtaaatgatcatttggatcaattacaggcttttagctggcttgtctgtcataattcatgattcggggctgggaaaaagaccaacagcctacgtgccaaaaaaggggcagagtttgatggagttgggtggacttttctatgccatttgcctccacacctagaggataagcacttttgcagacattcagtgcaagggagatcatgtttgactgtatggatgttctgtcagtgagtcctgggcaaatcctggatttctacactgcgagtccgtcttcctgcatgctccaggagaaagctctcaaagcatgcttcagtggattgacccaaaccgaatggcagcatcggcacactgctcaatcaattgaaacacagagcaccagctctgaggaactcgtcccaagccccccatctccacttcctccccctcgagtgtacaaaccctgcttcgtctgccaggacaaatcatcagggtaccactatggggtcagcgcctgtgagggatgtaagggctttttccgcagaagtattcagaagaatatgatttacacttgtcaccgagataagaactgtgttattaataaagtcaccaggaatcgatgccaatactgtcgactccagaagtgctttgaagtgggaatgtccaaagaatctgtcaggaatgacaggaacaagaaaaagaaggagacttcgaagcaagaatgcacagagagctatgaaatgacagctgagttggacgatctcacagagaagatccgaaaagctcaccaggaaactttcccttcactctgccagctgggtaaatacaccacgaattccagtgctgaccatcgagtccgactggacctgggcctctgggacaaattcagtgaactggccaccaagtgcattattaagatcgtggagtttgctaaacgtctgcctggtttcactggcttgaccatcgcagaccaaattaccctgctgaaggccgcctgcctggacatcctgattcttagaatttgcaccaggtataccccagaacaagacaccatgactttctcagacggccttaccctaaatcgaactcagatgcacaatgctggatttggtcctctgactgaccttgtgttcacctttgccaaccagctcctgcctttggaaatggatgacacagaaacaggccttctcagtgccatctgcttaatctgtggagaccgccaggaccttgaggaaccgacaaaagtagataagctacaagaaccattgctggaagcactaaaaatttatatcagaaaaagacgacccagcaagcctcacatgtttccaaagatcttaatgaaaatcacagatctccgtagcatcagtgctaaaggtgcagagcgtgtaattaccttgaaaatggaaattcctggatcaatgccacctctcattcaagaaatgctggagaattctgaaggacatgaacccttgaccccaagttcaagtgggaacacagcagagcacagtcctagcatctcacccagctcagtggaaaacagtggggtcagtcagtcaccactcgtgcaataagacattttctagctacttcaaacattccccagtaccttcagttccaggatttaaaatgcaagaaaaaacatttttactgctgcttagtttttggactgaaaagatattaaaactcaagaaggaccaagaagttttcatatgtatcaatatatatactcctcactgtgtaacttacctagaaatacaaacttttccaattttaaaaaatcagccatttcatgcaaccagaaactagttaaaagcttctattttcctctttgaacactcaagatgcatggcaaagacccagtcaaaatgatttacccctggttaagtttctgaagactttgtacatacagaagtatggctctgttctttctatactgtatgtttggtgctttccttttgtcttgcatactcaaaataaccatgacaccaaggttatgaaatagactactgtacacgtctacctaggttcaaaaagataactgtcttgctttcatggaatagtcaagacatcaaggtaaggaaacaggactattgacaggactattgtacagtatgacaagataaggctgaagatattctactttagttagtatggaagcttgtctttgctctttctgatgctctcaaactgcatcttttatttcatgttgcccagtaaaagtatacaaattccctgcactagcagaagagaattctgtatcagtgtaactgccagttcagttaatcaaatgtcatttgttcaattgttaatgtcactttaaattaaaagtggtttattacttgtttaatgacataactacacagttagttaaaaaaaatttttttacagtaatgatagcctccaaggcagaaacacttttcagtgttaagtttttgtttacttgttcacaagccattagggaaatttcatgggataattagcaggctggtctaccactggaccatgtaactctagtgtccttcctgattcatgcctgatattgggatttttttccagcccttcttgatgccaagggctaattatattacatcccaaagaaacaggcatagaatctgcctcctttgaccttgttcaatcactatgaagcagagtgaaagctgtggtagagtggttaacagatacaagtgtcagtttcttagttctcatttaagcactactggaatttttttttttgatatattagcaagtctgtgatgtactttcactggctctgtttgtacattgagattgtttgtttaacaatgctttctatgttcatatactgtttacctttttccatggactctcctggcaaagaataaaatatatttatttt

SEQ ID NO: 274 - DNA, 2992 bp, Homo sapiens
tggggggggggtggggagggagaaaaagaaagaaaatattttccgtgtccccgcctgcagagtcagtgtgcggtttgggagaaaatgtgtcggatattttggggcggtcacgtgggcgggcgggctccgagaggccccgggacagtcccagcctagagccgtgcccccccaggagccccccagtacggcgagccccggacattgcgacgctccatccaagagactgcccgacgccgggacctcggggctccgccgcctcccttccccctcccactccagctacggcccagttccctcaacctgacccagtatgtagaagccagtctctgcaggcggccagcgggacttttggaggcccagtgggcaggccaggcagggcgggtacggagcctcccaggctggggcagtgggcatgggcaggggctgtggctgaagacctcgcccgcccactgcagaccccaggggactctcacaccgcagctgccatggccaccaataaggagcgactctttgcggctggtgccctggggcctggatctggctacccaggggcaggtttccccttcgccttcccaggggcactcagggggtctccgcctttcgagatgctgagccctagcttccggggcctgggccagcctgacctccccaaggagatggcctctctgtcggtggagacacagagcaccagctcagaggagatggtgcccagctcgccctcgccccctccgcctcctcgggtctacaagccatgcttcgtgtgcaatgacaagtcctctggctaccactatggggtcagctcttgtgaaggctgcaagggcttctttcgccgaagcatccagaagaacatggtgtacacgtgtcaccgcgacaaaaactgtatcatcaacaaggtgaccaggaatcgctgccagtactgccggctacagaagtgcttcgaagtgggcatgtccaaggaagctgtgcgaaatgaccggaacaagaagaagaaagaggtgaaggaagaagggtcacctgacagctatgagctgagccctcagttagaagagctcatcaccaaggtcagcaaagcccatcaggagactttcccctcgctctgccagctgggcaagtataccacgaactccagtgcagaccaccgcgtgcagctggatctggggctgtgggacaagttcagtgagctggctaccaagtgcatcatcaagatcgtggagtttgccaagcggttgcctggctttacagggctcagcattgctgaccagatcactctgctcaaagctgcctgcctagatatcctgatgctgcgtatctgcacaaggtacaccccagagcaggacaccatgaccttctccgacgggctgaccctgaaccggacccagatgcacaatgccggcttcgggcccctcacagaccttgtctttgcctttgctgggcagctcctgcccctggagatggatgacaccgagacagggctgctcagcgccatctgcctcatctgcggagaccgcatggacctggaggagcccgaaaaagtggacaagctgcaggagccactgctggaagccctgaggctgtacgcccggcgccggcggcccagccagccctacatgttcccaaggatgctaatgaaaatcaccgacctccggggcatcagcactaagggagctgaaagggccattactctgaagatggagattccaggcccgatgcctcccttaatccgagagatgctggagaaccctgaaatgtttgaggatgactcctcgcagcctggtccccaccccaatgcctctagcgaggatgaggttcctgggggccagggcaaagggggcctgaagtccccagcctgaccagggcccctgacctccccgctgtgggggttggggcttcaggcagcagactgaccatctcccagaccgccagtgactgggggaggacctgctctgccctctccccaccccttccaatgagctccttgtttttgccaaagtttctaggggtgcctctgtgttcatccccttcctgatctaaccggctccctcgccagtcccgggggcctgccctgctcccaccaggagagagggcaaagggatgagcctgggtttggactctaaaatctcagcactgccccatgggtcctagacttcccagggcaagaggaagaccctgccattccacagccccttcctctgccaggtgcttggctctctgagagcaaacaggaacactagagaccaaaaaggggacaaaggagaagggctgagcccaccttcttgctcctacccttggtgcctaatgctgtgtgatgcacctgcagggtgtgtgctagcctctgtgccccgtccttgtgccaggtcaaggtgggggcaggctgggccctgcatttctggggcaggaacagagggtgaaagggacagatagatgcaggtccattctgcacctcttggctcgggtgcagagttcaccctgtgccctccgttataagtccctcccccagccctgtcatgtgccttgggctcctcctgccctccatctcagccattggggcagggaccctcctacactacagaggggccaggggatccctctctccctagtgccttccaccctttactccccagagcagcttggcccagggaggggggatgctgcttagctgatcccgccctgacccagaggaagcctctatttatttattagcttttgtttacaccgtggaattgaccccttcctccaggggtcttgggtgggggagcccagggcccctgtgacccctcctttcttcctccaatccccagtttgtatttagctgccaaataagattcccattggctccctgtgttctcttggggggtcagggtgctgtcccctcccctctgtttacatctcccctctaccccgctgtatcgcatattgctgagttttctatttttgcaaaataaagtgatggaaactcaaaaaaaaaaaaaaaaaaaaaaaaaaaaaaaaaaaa

SEQ ID NO: 275 - DNA, 521 bp, Homo sapiens
agaccgtgtgtttccaaaatggcggcagcgatggatgtggataccccgagcggcaccaacagcggcgcgggcaagaagcgctttgaagtgaaaaagtggaatgcagtagccctctgggcctgggatattgtggttgataactgtgccatctgcaggaaccacattatggatctttgcatagaatgtcaagctaaccaggcgtccgctacttcagaagagtgtactgtcgcatggggagtctgtaaccatgcttttcacttccactgcatctctcgctggctcaaaacacgacaggtgtgtccattggacaacagagagtgggaattccaaaagtatgggcactaggaaaagacttcttccatcaagcttaattgttttgttattcatttaatgactttccctgctgttacctaattacaaattggatggaactgtgtttttttctgctttgttttttcagtttgctgtttctgtagccatattgtattctgtgtcaaataaagtccagttggattctggaa

SEQ ID NO: 276 - DNA, 3663 bp, Homo sapiens
ggcggcggcggcggcgcggactgggtgcgcggcgcagcgtcctgtgttggaatgtgcggctgccgcgagctcgcggcgcagcagcggagcgagcgccgccgaggcccggggccccagaccctggcggcggctgcggcagccgagacggcagggcgaggcccggaggcctgagcaccctctgcagccccactcctgggccttcttggtccacgacggccccagcacccaactttaccaccctcccccacctctcccccgaaactccagcaacaaagaaaagtagtcggagaaggagcggcgactcagggtcgcccgcccctcctcaccgaggaaggccgaatacagttatggccacccaggtaatggggcagtcttctggaggaggagggctgtttaccagcagtggcaacattggaatggccctgcctaacgacatgtatgacttgcatgacctttccaaagctgaactggccgcacctcagcttattatgctggcaaatgtggccttaactggggaagtaaatggcagctgctgtgattacctggtcggtgaagaaagacagatggcagaactgatgccggttggggataacaacttttcagatagtgaagaaggagaaggacttgaagagtctgctgatataaaaggtgaacctcatggactggaaaacatggaactgagaagtttggaactcagcgtcgtagaacctcagcctgtatttgaggcatcaggtgctccagatatttacagttcaaataaagatcttccccctgaaacacctggagcggaggacaaaggcaagagctcgaagaccaaaccctttcgctgtaagccatgccaatatgaagcagaatctgaagaacagtttgtgcatcacatcagagttcacagtgctaagaaattttttgtggaagagagtgcagagaagcaggcaaaagccagggaatctggctcttccactgcagaagagggagatttctccaagggccccattcgctgtgaccgctgcggctacaatactaatcgatatgatcactatacagcacacctgaaacaccacaccagagctggggataatgagcgagtctacaagtgtatcatttgcacatacacaacagtgagcgagtatcactggaggaaacatttaagaaaccattttccaaggaaagtatacacatgtggaaaatgcaactatttttcagacagaaaaaacaattatgttcagcatgttagaactcatacaggagaacgcccatataaatgtgaactttgtccttactcaagttctcagaagactcatctaactagacatatgcgtactcattcaggtgagaagccatttaaatgtgatcagtgcagttatgtggcctctaatcaacatgaagtaacccgccatgcaagacaggttcacaatgggcctaaacctcttaattgcccacactgtgattacaaaacagcagatagaagcaacttcaaaaaacatgtagagctacatgtgaacccacggcagttcaattgccctgtatgtgactatgcagcttccaagaagtgtaatctacagtatcacttcaaatctaagcatcctacttgtcctaataaaacaatggatgtctcaaaagtgaaactaaagaaaaccaaaaaacgagaggctgacttgcctgataatattaccaatgaaaaaacagaaatagaacaaacaaaaataaaaggggatgtggctggaaagaaaaatgaaaagtccgtcaaagcagagaaaagagatgtctcaaaagagaaaaagccttctaataatgtgtcagtgatccaggtgactaccagaactcgaaaatcagtaacagaggtgaaagagatggatgtgcatacaggaagcaattcagaaaaattcagtaaaactaagaaaagcaaaaggaagctggaagttgacagccattctttacatggtcctgtgaatgatgaggaatcttcaacaaaaaagaaaaagaaggtagaaagcaaatccaaaaataatagtcaggaagtgccaaagggtgacagcaaagtggaggagaataaaaagcaaaatacttgcatgaaaaaaagtacaaagaagaaaactctgaaaaataaatcaagtaagaaaagcagtaagcctcctcagaaggaacctgttgagaagggatctgctcagatggaccctcctcagatggggcctgctcccacagaggcggttcagaaggggcccgttcaggtggagctgccacctcccatggagcatgctcagatggagggtgcccagatacggcctgctcctgacgagcctgttcagatggaggtggttcaggaggggcctgctcagaaggagctgctgcctcccgtggagcctgctcagatggtgggtgcccaaattgtacttgctcacatggagctgcctcctcccatggagactgctcagacggaggttgcccaaatggggcctgctcccatggaacctgctcagatggaggttgcccaggtagaatctgctcccatgcaggtggtccagaaggagcctgttcagatggagctgtctcctcccatggaggtggtccagaaggagcctgttcagatagagctgtctcctcccatggaggtggtccagaaggaacctgttaagatagagctgtctcctcccatagaggtggtccagaaggagcctgttcagatggagttgtctcctcccatgggggtggttcagaaggagcctgctcagagggagccacctcctcccagagagcctccccttcacatggagccaatttccaaaaagcctcctctccgaaaagataaaaaggaaaagtctaacatgcagagtgaaagggcacggaaggagcaagtccttattgaagttggcttagtgcctgttaaagatagctggcttctaaaggaaagtgtaagcacagaggatctctcaccaccatcaccaccactgccaaaggaaaatttaagagaagaggcatcaggagaccaaaaattactcaacacaggtgaaggaaataaagaagcccctcttcagaaagtaggagcagaagaggcagatgagagcctacctggtcttgctgctaatatcaacgaatctacccatatttcatcctctggacaaaacttgaatacgccagagggtgaaactttaaatggtaaacatcagactgacagtatagtttgtgaaatgaaaatggacactgatcagaacacaagagagaatctcactggtataaattcaacagttgaagaaccagtttcaccaatgcttcccccttcagcagtagaagaacgtgaagcagtgtccaaaactgcactggcatcacctcctgctacaatggcagcaaatgagtctcaggaaattgatgaagatgaaggcatccacagccatgaaggaagtgacctaagtgacaacatgtcagagggtagtgatgattctggattgcatggggctcggccagttccacaagaatctagcagaaaaaatgcaaaggaagccttggcagtcaaagcggctaagggagattttgtttgtatcttctgtgatcgttctttcagaaagggaaaagattacagcaaacacctcaatcgccatttggttaatgtgtactatcttgaagaagcagctcaagggcaggagtaatgaaactttgaacaaggtttca

SEQ ID NO: 277 - DNA, 2092 bp, Homo sapiens
ggcgtaattaaaaagcggcggaagaaggtgggagggtcatgacgcagcgagtttcagtcgtgacttttctgggggcatcgcggcgtcccctttttttgcctttaaagtaaaacgtcgccccgacgcaccccccgcgtatttcggggggcggaggcggcgggccacggcgcgaagaggggcggtgctgacgccggccggtcacgtgggcgtgttgtgggggggaggggcgccgccgcgcggtcggttccgggcggttgggagcgcgcgagctagcgagcgagaggcagccgcgcccgccgccgcccctgctctgtatgccgctctctcccggcgcggccgccgccgatcacagcagcaggagccaccgccgccgcggttgatgtggttgggccggggctgaggaggccgccaagatgccgcagtccaagtcccggaagatcgcgatcctgggctaccggtctgtggggaaatcctcattgacgattcaatttgttgaaggccaatttgtggactcctacgatccaaccatagaaaacacttttacaaagttgatcacagtaaatggacaagaatatcatcttcaacttgtagacacagccgggcaagatgaatattctatctttcctcagacatactccatagatattaatggctatattcttgtgtattctgttacatcaatcaaaagttttgaagtgattaaagttatccatggcaaattgttggatatggtggggaaagtacaaatacctattatgttggttgggaataagaaagacctgcatatggaaagggtgatcagttatgaagaagggaaagctttggcagaatcttggaatgcagcttttttggaatcttctgctaaagaaaatcagactgctgtggatgtttttcgaaggataattttggaggcagaaaaaatggacggggcagcttcacaaggcaagtcttcatgctcggtgatgtgattctgctgcaaagcctgaggacactgggaatatattctacctgaagaagcaaactgcccgttctccttgaagataaactatgcttcttttttcttctgttaacctgaaagatatcatttgggtcagagctcccctcccttcagattatgttaactctgagtctgtccaaatgagttcacttccattttcaaattttaagcaatcatattttcaatttatatattgtatttcttaatattatgaccaagaattttatcggcattaatttttcagtgtagtttgttgtttaaaataatgtaatcatcaaaatgatgcatattgttacactactattaactaggcttcagtatatcagtgtttatttcattgtgttaaatgtatacttgtaaataaaatagctgcaaacctcagtcctttgtgctacttgatgtggctttcaaagaagagaagccttgtcctgagtttctcacttggcttcaggaaggccccaggttggattccagaaaccagtgaagatgtggccacaggaggaggtgtgctgaggtggctgctgaccgtggactccctgcgcagtggcctgcagatgttggggctgggttacagctgattgaagctgagtggccctggggggtctgtgaggggagttcctccccagtgatgaaattctctccttccaccctcaaatccctagaccttgactgaaatgctccgtggtcgggagcctggtcaaggaggaggagctgctgagaggcattgttcgcccttgctcatagcttagctcgatgtccgtgtcagacaggagatgattgagaacagccttgcctgtcactgtcctagaacaccctggagtttagtgttctgtgtcagagtcttgggagcctccttcagacccagatgacgggcctccctctgtccaaggagcagctgtaaaggagaagagggatttcatttgtttggtggctgttaccttgtctgtaagtcaaacttggagttgagcagtgctttttaaacgattcccttttgcagctaaaatttcacagggctatttctaatacgtaagcaaatgttaccattgactttattaataaaatatagttttgctttgcaaaaaaaaaaaaaaaaaa

SEQ ID NO: 278 - DNA, 1926 bp, Homo sapiens
gtggatgagctgtgagtgcgcgcgcgtgcgcggggccgcgacctgtgccggctcgagcccgctgggcactcggaggcgcgcacgtcgttccccgccctcccgccgccgcccgccctcgctctctcgcgctaccctcccgccgcccgcggtcctccgtcggttctctcgttagtccacggtctggtcttcagctacccgccttcgtctccgagtttgcgactcgcggaccggcgtccccggcgcgaagaggctggactcggattcgttgcctgagcaatggctgccatccggaagaaactggtgattgttggtgatggagcctgtggaaagacatgcttgctcatagtcttcagcaaggaccagttcccagaggtgtatgtgcccacagtgtttgagaactatgtggcagatatcgaggtggatggaaagcaggtagagttggctttgtgggacacagctgggcaggaagattatgatcgcctgaggcccctctcctacccagataccgatgttatactgatgtgtttttccatcgacagccctgatagtttagaaaacatcccagaaaagtggaccccagaagtcaagcatttctgtcccaacgtgcccatcatcctggttgggaataagaaggatcttcggaatgatgagcacacaaggcgggagctagccaagatgaagcaggagccggtgaaacctgaagaaggcagagatatggcaaacaggattggcgcttttgggtacatggagtgttcagcaaagaccaaagatggagtgagagaggtttttgaaatggctacgagagctgctctgcaagctagacgtgggaagaaaaaatctgggtgccttgtcttgtgaaaccttgctgcaagcacagcccttatgcggttaattttgaagtgctgtttattaatcttagtgtatgattactggcctttttcatttatctataatttacctaagattacaaatcagaagtcatcttgctaccagtatttagaagccaactatgattattaacgatgtccaacccgtctggcccaccagggtccttttgacactgctctaacagccctcctctgcactcccacctgacacaccaggcgctaattcaaggaatttcttaacttcttgcttctttctagaaagagaaacagttggtaacttttgtgaattaggctgtaactactttataactaacatgtcctgcctattatctgtcagctgcaaggtactctggtgagtcaccacttcagggctttactccgtaacagattttgttggcatagctctggggtgggcagttttttgaaaatgggctcaaccagaaaagcccaagttcatgcagctgtggcagagttacagttctgtggtttcatgttagttaccttatagttactgtgtaattagtgccacttaatgtatgttaccaaaaataaatatatctaccccagactagatgtagtattttttgtataattggatttcctaatactgtcatcctcaaagaaagtgtattggttttttaaaaaagaaagtgtatttggaaataaagtcagatggaaaattcattttttaaattcccgttttgtcactttttctgataaaagatggccatattaccccttttcggccccatgtatctcagtaccccatggagctgggctaagtaaataggaattggtttcacgcctgaggcaattagacactttggaagatggcataacctgtctcacctggacttaagcatctggctctaattcacagtgctcttttctcctcactgtatccaggttccctcccagaggagccaccagttctcatgggtggcactcagtctctcttctctccagctgactaaactttttttctgtaccagttaatttttccaactactaatagaataaaggcagttttctaaaaaaa

SEQ ID NO: 279 - DNA, 4369 bp, Homo sapiens
cgtgggcgccagaaagcggaacctcccgggccagtcgcgcggtggtcaccctcttgggagctggggaggaggctgcggaggctggcccggctccttcgggcgtcgcttcccggaccgggtgcgcggggtcccccggaacgtgtgttccaggtcctcccgcgccagtgttcgcagtccccgcctggtcgcggcggcgcctcgggcgcgggtgcaggcgcgcggcgcgcaggcggggggcgctgtggtcttggcgcggggaccgagccgctcggccagacccgcctcttttccctccccgccagcccgcccgcctgcccgccccccacgcgtcgtgtcgccgggaagccgggcggagacagagcgcttgggatccacggcgctcggaccgctgtcctccaacagcgcagggcagagcggctggcgccgccggagcgcggagccacgaccctccctggccgcctttgtctactggccgtgcggcccggaaccgccactctccagggccggggacgcgcccgcagctgtcggtgacagctcctccctaccgcaaccctccggggcggaggggcggtcgggccgggccctgctagcccgcgaccgcaagcccgcgctcgcggatcgatgcccccgcagcagggggaccccgcgttccccgaccgctgcgaggcgcctccggtgccgccgcgtcgggagcgcggtggacgcgggggacgcgggcctggggagccggggggccgggggcgtgcggggggtgccgaggggcgcggcgtcaagtgcgtgctggtcggcgacggcgcggtgggcaagacgagcctggtggtgagctacaccaccaacggctaccccaccgagtacatccctactgccttcgacaacttctccgcggtggtgtctgtggatgggcggcccgtgagactccaactctgtgacactgccggacaggatgaatttgacaagctgaggcctctctgctacaccaacacagacatcttcctgctctgcttcagtgtcgtgagcccctcatccttccagaacgtcagtgagaaatgggtgccggagattcgatgccactgtcccaaagcccccatcatcctagttggaacgcagtcggatctcagagaagatgtcaaagtcctcattgagttggacaaatgcaaagaaaagccagtgcctgaagaggcggctaagctgtgcgccgaggaaatcaaagccgcctcctacatcgagtgttcagccttgactcaaaaaaacctcaaagaggtctttgatgcagccatcgtcgctggcattcaatactcggacactcagcaacagccaaagaagtctaaaagcaggactccagataaaatgaaaaacctctccaagtcctggtggaagaagtactgctgtttcgtatgatgctggcaagacacccagaaaggctattttcagatgaaatcgatattagaagctatattagctgaaacaactccttttactgcgtagaacctatatcgagagtgtgtgtatatgtattataggaggagctctcaattttatgtattctttctgcctttaattttcttgtttgtttgagcttagggatgagatacttatgcaagatatttttgaagtaaattaaacatttttcacatctctggaaatttagagttctagacctctggttaatttatatctaatatgaagaagacacctctaatctggatgttaagaatgaagttctgctacattataatgtacagaagagcaaaagggaggaacactatggttaaccctctcttgattaagggctacttaatgcacagtgcattatgtacacaggtcaaccatggtaacaatagttcttagctttgaaactccatgcaaaccatgccttttttttaaggagcaaaaatctgagaaaaaaagtgagagacctctgcctacaaaacctcaaaccagtcacttttgtcaattgctaatacccagttacttatgatttaaaaacaaccaacagaaaacatcccactgactgtatggcactctgtagtcaaaaaaggaaacttccttattgggacttttctttcttagtccagttgtgttgacacatatgaacacagacaaagtgctatgcggaggaaagcaagtgttggtcagtagtttcatgttttagggagtggttcctgtggagatcagaaagtgacatttgctttcggtactgtaatacgtgcaccaaactgcctcaatcctaggtaacgagggcaacagggagcacctgtctggattgtttttaaacctccatactcaagctgtctcttcggcagggaggtgaatactcttgaaaggccaacagcaagtgtttgtgggacacaacacagataattttttcttaagtcggccaagatgtacttctctgtgtgcacacccatgcacactcatgcacacagatacataggtctgtatggctgtatttgctgttgattcagactttcacaccattaatggggaaaagcgtggccacaaaaacagatgctaggaagcttggcttcctcttcttgttgacccttttttgaaccaacatcttttttattatattcagagtatgtttttaagtgtatcttaatatatacattttttaggacatcttaaatctaaacaaaaaataaaatgaacatctcttgaaacctgttaaaacaaccagttaaagccacagatggctttcagggcagtagcagcagaggccagtggactctgaggactcctgaggggcggggcgtgtagccagccaggtgcatgccgggaccatggcccccatacttggctgcttcctgtgacagtgaaatacatccttcaaggtggcagctgttagggctgaatcttctggagaaaaaggtgccatctcaggagaatagcttttactctggtaggaatgcttccgagacaccacaaggcagcctgaacactcagttgcagggtcgggcttgcggtgggtgacccagagccaccaaagtcacatccacaactaatgagggaaatctgtaaagccagttagatagaagaattttatttttctgtgggttttgtgttgtcttttttatgttaaaaagaaatccagtttgtgtttttctatagaaaaagtaaaagatcaggttatactttaggttaggggttctatttattcctgttagtaaataaaattaacaaatttctttgtttaacaaaagattaatctttaaaccactaaaatacatagactgattgattattcaacacattggaattgatgtcggtcatagtttcctgaagcatttagttacaacctgaaggaataaaatgatttgtggaaatgcttaaaatagacctaactgaatacagtctcatcttgccgcgcctggcttacctatctgtggaaagctaggcttcccaggctgggctctgcctgtctggtgcctggaggtgtgggagggaagatgagttatttaactggtaagcgatttgaaacactatttttatattaaagtaaatggcatggagtatagtgcaaattcatttttaagatagaacacaaaacttgaaagaagttttatgcgtgtgacagtgtatggggctgcagttggtctccctggaggggacttccacacctcctgcctttaggccatgggtggaaagtgctcagtgaagtacacctgtgtggcccagttctgaaagctttatacagttgaattttaagtggggttgataacaccttggactgttagtgttaaaaatctagtgggttgacctttaaatgcaacagtttttaaaatatattgctgcattttatagaatagtaaaggtacgattatacttgagattttcctccatttttatttcttcgtgaacatagagtttggggccgaaaatgtttttaaagtatgtgtttgagttaaatataaagttggttcacttcaaagctaaaaaattgttaaacttgcagcttggtattgcagagaagattttataagaattttgctttagagaatgccactttggctgaactacaagtgtaggccaccattataatttataaatacagcatacttcaaaactgtttgttatctcttgttaccatgtatgtataaatggaccttttataaccttgttctctgcttgacagactcaagagaaactacccaggtattacacaagccaaaatgggagcaaggccttctctccagactatcgtaacctggtgccttaccaagttgtgcttttctgttttcaagtgtaaatgatgttgagcagaatgttgtacttgaaaatgctataagtgagatggtatgaaataaattctgacttatgaaaaaaaaaaaaaaaaaaaaaaaaaaaaaaaaaaaaaaaaaaaaaaaaa

SEQ ID NO: 280 - DNA, 6650 bp, Homo sapiens
gctggttccccttccgagcgtccgcgccccgcatgcgcagtctgccccggcggtctccgtttgtttgaacaggaaggcggacatattagtccctctcagcccccctcgccccaccccccaggcattcgccgccgcgactcgccctttccccggctgggaccgcagcccctcccagaagctcccccatcagcagccgccgggacccaactatcgtcttcctcttcgcccgctctccagcctttcctctgctaagtctccatcgggcatcgacctcgccctgccccaccggacaccgtagcagcagccccagcagcgacgggacaaaatgggagagtgaggctgtcctgcgtggaccagctcgtggccgagactgatcggtgcgtcgggccgggccgagtagagccggggacgcggggctagaccgtctacagcgcctctgagcggagcgggcccggcccgtggcccgagcggcggccgcagctggcacagctcctcacccgccctttgctttcgcctttcctcttctccctcccttgttgcccggagggagtctccaccctgcttctctttctctacccgctcctgcccatctcgggacggggacccctccatggcgacggcggccggggcccgctagactgaagcacctcgccggagcgacgaggctggtggcgacggcgctgtcggctgtcgtgaggggctgccgggtgggatgcgactttgggcgtccgagcggctgtgggtcgctgttgcccccggcccggggtctggagagcggaggtcccctcagtgaggggaagacgggggaaccgggcgcacctggtgaccctgaggttccggctcctccgccccgcggctgcgaacccaccgcggaggaagttggttgaaattgctttccgctgctggtgctggtaagagggcattgtcacagcagcagcaacatgtcgactggggacagttttgagactcgatttgaaaaaatggacaacctgctgcgggatcccaaatcggaagtgaattcggattgtttgctggatggattggatgctttggtatatgatttggattttcctgccttaagaaaaaacaaaaatattgacaactttttaagcagatataaagacacaataaataaaatcagagatttacgaatgaaagctgaagattatgaagtagtgaaggtgattggtagaggtgcatttggagaagttcaattggtaaggcataaatccaccaggaaggtatatgctatgaagcttctcagcaaatttgaaatgataaagagatctgattctgcttttttctgggaagaaagggacatcatggcttttgccaacagtccttgggttgttcagcttttttatgcattccaagatgatcgttatctctacatggtgatggaatacatgcctggtggagatcttgtaaacttaatgagcaactatgatgtgcctgaaaaatgggcacgattctatactgcagaagtagttcttgcattggatgcaatccattccatgggttttattcacagagatgtgaagcctgataacatgctgctggataaatctggacatttgaagttagcagattttggtacttgtatgaagatgaataaggaaggcatggtacgatgtgatacagcggttggaacacctgattatatttcccctgaagtattaaaatcccaaggtggtgatggttattatggaagagaatgtgactggtggtcggttggggtatttttatacgaaatgcttgtaggtgatacacctttttatgcagattctttggttggaacttacagtaaaattatgaaccataaaaattcacttacctttcctgatgataatgacatatcaaaagaagcaaaaaaccttatttgtgccttccttactgacagggaagtgaggttagggcgaaatggtgtagaagaaatcaaacgacatctcttcttcaaaaatgaccagtgggcttgggaaacgctccgagacactgtagcaccagttgtacccgatttaagtagtgacattgatactagtaattttgatgacttggaagaagataaaggagaggaagaaacattccctattcctaaagctttcgttggcaatcaactaccttttgtaggatttacatattatagcaatcgtagatacttatcttcagcaaatcctaatgataacagaactagctccaatgcagataaaagcttgcaggaaagtttgcaaaaaacaatctataagctggaagaacagctgcataatgaaatgcagttaaaagatgaaatggagcagaagtgcagaacctcaaacataaaactagacaagataatgaaagaattggatgaagagggaaatcaaagaagaaatctagaatctacagtgtctcagattgagaaggagaaaatgttgctacagcatagaattaatgagtaccaaagaaaagctgaacaggaaaatgagaagagaagaaatgtagaaaatgaagtttctacattaaaggatcagttggaagacttaaagaaagtcagtcagaattcacagcttgctaatgagaagctgtcccagttacaaaagcagctagaagaagccaatgacttacttaggacagaatcggacacagctgtaagattgaggaagagtcacacagagatgagcaagtcaattagtcagttagagtccctgaacagagagttgcaagagagaaatcgaattttagagaattctaagtcacaaacagacaaagattattaccagctgcaagctatattagaagctgaacgaagagacagaggtcatgattctgagatgattggagaccttcaagctcgaattacatctttacaagaggaggtgaagcatctcaaacataatctcgaaaaagtggaaggagaaagaaaagaggctcaagacatgcttaatcactcagaaaaggaaaagaataatttagagatagatttaaactacaaacttaaatcattacaacaacggttagaacaagaggtaaatgaacacaaagtaaccaaagctcgtttaactgacaaacatcaatctattgaagaggcaaagtctgtggcaatgtgtgagatggaaaaaaagctgaaagaagaaagagaagctcgagagaaggctgaaaatcgggttgttcagattgagaaacagtgttccatgctagacgttgatctgaagcaatctcagcagaaactagaacatttgactggaaataaagaaaggatggaggatgaagttaagaatctaaccctgcaactggagcaggaatcaaataagcggctgttgttacaaaatgaattgaagactcaagcatttgaggcagacaatttaaaaggtttagaaaagcagatgaaacaggaaataaatactttattggaagcaaagagattattagaatttgagttagctcagcttacgaaacagtatagaggaaatgaaggacagatgcgggagctacaagatcagcttgaagctgagcaatatttctcgacactttataaaacccaggtaaaggaacttaaagaagaaattgaagaaaaaaacagagaaaatttaaagaaaatacaggaactacaaaatgaaaaagaaactcttgctactcagttggatctagcagaaacaaaagctgagtctgagcagttggcgcgaggccttctggaagaacagtattttgaattgacgcaagaaagcaagaaagctgcttcaagaaatagacaagagattacagataaagatcacactgttagtcggcttgaagaagcaaacagcatgctaaccaaagatattgaaatattaagaagagagaatgaagagctaacagagaaaatgaagaaggcagaggaagaatataaactggagaaggaggaggagatcagtaatcttaaggctgcctttgaaaagaatatcaacactgaacgaacccttaaaacacaggctgttaacaaattggcagaaataatgaatcgaaaagattttaaaattgatagaaagaaagctaatacacaagatttgagaaagaaagaaaaggaaaatcgaaagctgcaactggaactcaaccaagaaagagagaaattcaaccagatggtagtgaaacatcagaaggaactgaatgacatgcaagcgcaattggtagaagaatgtgcacataggaatgagcttcagatgcagttggccagcaaagagagtgatattgagcaattgcgtgctaaacttttggacctctcggattctacaagtgttgctagttttcctagtgctgatgaaactgatggtaacctcccagagtcaagaattgaaggttggctttcagtaccaaatagaggaaatatcaaacgatatggctggaagaaacagtatgttgtggtaagcagcaaaaaaattttgttctataatgacgaacaagataaggagcaatccaatccatctatggtattggacatagataaactgtttcacgttagacctgtaacccaaggagatgtgtatagagctgaaactgaagaaattcctaaaatattccagatactatatgcaaatgaaggtgaatgtagaaaagatgtagagatggaaccagtacaacaagctgaaaaaactaatttccaaaatcacaaaggccatgagtttattcctacactctaccactttcctgccaattgtgatgcctgtgccaaacctctctggcatgtttttaagccaccccctgccctagagtgtcgaagatgccatgttaagtgccacagagatcacttagataagaaagaggacttaatttgtccatgtaaagtaagttatgatgtaacatcagcaagagatatgctgctgttagcatgttctcaggatgaacaaaaaaaatgggtaactcatttagtaaagaaaatccctaagaatccaccatctggttttgttcgtgcttcccctcgaacgctttctacaagatccactgcaaatcagtctttccggaaagtggtcaaaaatacatctggaaaaactagttaaccatgtgactgagtgccctgtggaatcgtgtgggatgctacctgataaaccaggcttctttaaccatgcagagcagacaggctgtttctttgacacaaatatcacaggcttcagggttaagattgctgtttttctgtccttgctttggcacaacacactgagggttttttttattgcgggtttgcctacaggtagattagattaattattactatgtaatgcaagtacagttgggggaaagcttaggtagatatattttttttaaaaggtgctgcctttttggatttataagaaaatgcctgtcagtcgtgatagaacagagttttcctcatatgagtaagaggaagggactttcactttcaagtggaacagccatcactatcaagatcagctcatggaaggagtaaagaaaatatctcaaaatgagacaaactgaagttttgttttttttttaatgacttaagtttttgtgctcttgcaagactatacaaaactattttaagaaagcagtgatatcacttgaacttcagtgccctcactgtagaatttaaaagccttactgttgattgcccatgttggacttgatggagaaattaaatatctttcattatgctttacaaaatactgtatatgtttcagcaagtttggggaatgggagaggacaaaaaaaagttacatttaatctatgcatttttgccaagccatattgagttattttactactagagacattaggaaactaactgtacaaaagaaccaagtttaaaagcattttgtggggtacatcatttctataattgtataatgtatttctttgtggttttaaatgataaagacattaagttaacaaacatataagaaatgtatgcactgtttgaaatgtaaattattcttagaacactttcaatgggggttgcattgtccttttagtgccttaatttgagataattattttactgccatgagtaagtatagaaatttcaaaaaatgtattttcaaaaaattatgtgtgtcagtgagtttttcattgataattggtttaatttaaaatatttagaggtttgttggactttcataaattgagtacaatctttgcatcaaactacctgctacaataatgactttataaaactgcaaaaaatgtagaaggttgcaccaacataaaaaggaaatatggcaatacatccatgatgttttccagttaacataggaattaccagataaatactgttaaactcttgtccagtaacaagagttgattcatatggacagtatgatttattgtttatttttttaaccaaatacctcctcagtaatttataatggctttgcagtaatgtgtatcagataagaagcactggaaaaccgatcgtctctaggatgatatgcatgtttcaagtggtattgaaagccgcactgatggatatgtaataataaacatatctgttattaatatactaatgactctgtgctcatttaatgagaaataaaagtaatttatggatgggtatctttaatttttactgcaatgtgttttctcatggctgaaatgaatggaaaacatacttcaaattagtctctgattgtatataaatgtttgtgaaattccatggttagattaaagtgtatttttaaaagataaaa

SEQ ID NO: 281 - DNA, 6401 bp, Homo sapiens
caaggcggccggcggcgaccatggcagcgggccggcggcggccgtagtggcccaggcctgggcttcagcctcccggggccccagagggcggggcggtccgggccgcggcggtggcggcgccacttccctgctcccgcccgaggactcctgcgggcactcgctgaggaccagcggaccggcggcgcgaatctgactgaggggcggggacgccgtctgttccccgccgctcccggcagggccgggccgggctgggccgggctgggccgggcgggcccctgggagcagcccccaggcgggggaccgccttggagacccgaagccggagctagaggcaggcggtgggcccgggtggagtcccggccggagctggtggttcgggggcggtgctaggccccgaggctgcgggacctgagcgcgaggagcctgagtgcgggtccagcggtggcggcatgagccggcccccgccgacggggaaaatgcccggcgcccccgagaccgcgccgggggacggggcaggcgcgagccgccagaggaagctggaggcgctgatccgagaccctcgctcccccatcaacgtggagagcttgctggatggcttaaattccttggtccttgatttagattttcctgctttgaggaaaaacaagaacatagataatttcttaaatagatatgagaaaattgtgaaaaaaatcagaggtctacagatgaaggcagaagactatgatgttgtaaaagttattggaagaggtgcttttggtgaagtgcagttggttcgtcacaaggcatcgcagaaggtttatgctatgaagcttcttagtaagtttgaaatgataaaaagatcagattctgcctttttttgggaagaaagagatattatggcctttgccaatagcccctgggtggttcagcttttttatgcctttcaagatgataggtatctgtacatggtaatggagtacatgcctggtggagaccttgtaaaccttatgagtaattatgatgtgcctgaaaaatgggccaaattttacactgctgaagttgttcttgctctggatgcaatacactccatgggtttaatacacagagatgtgaagcctgacaacatgctcttggataaacatggacatctaaaattagcagattttggcacgtgtatgaagatggatgaaacaggcatggtacattgtgatacagcagttggaacaccggattatatatcacctgaggttctgaaatcacaagggggtgatggtttctatgggcgagaatgtgattggtggtctgtaggtgttttcctttatgagatgctagtgggggatactccattttatgcggattcacttgtaggaacatatagcaaaattatggatcataagaattcactgtgtttccctgaagatgcagaaatttccaaacatgcaaagaatctcatctgtgctttcttaacagatagggaggtacgacttgggagaaatggggtggaagaaatcagacagcatcctttctttaagaatgatcagtggcattgggataacataagagaaacggcagctcctgtagtacctgaactcagcagtgacatagacagcagcaatttcgatgacattgaagatgacaaaggagatgtagaaaccttcccaattcctaaagcttttgttggaaatcagctgcctttcatcggatttacctactatagagaaaatttattattaagtgactctccatcttgtagagaaactgattccatacaatcaaggaaaaatgaagaaagtcaagagattcagaaaaaactgtatacattagaagaacatcttagcaatgagatgcaagccaaagaggaactggaacagaagtgcaaatctgttaatactcgcctagaaaaaacagcaaaggagctagaagaggagattaccttacggaaaagtgtggaatcagcattaagacagttagaaagagaaaaggcgcttcttcagcacaaaaatgcagaatatcagaggaaagctgatcatgaagcagacaaaaaacgaaatttggaaaatgatgttaacagcttaaaagatcaacttgaagatttgaaaaaaagaaatcaaaactctcaaatatccactgagaaagtgaatcaactccagagacaactggatgaaaccaatgctttactgcgaacagagtctgatactgcagcccggttaaggaaaacccaggcagaaagttcaaaacagattcagcagctggaatctaacaatagagatctacaagataaaaactgcctgctggagactgccaagttaaaacttgaaaaggaatttatcaatcttcagtcagctctagaatctgaaaggagggatcgaacccatggatcagagataattaatgatttacaaggtagaatatgtggcctagaagaagatttaaagaacggcaaaatcttactagcgaaagtagaactggagaagagacaacttcaggagagatttactgatttggaaaaggaaaaaagcaacatggaaatagatatgacataccaactaaaagttatacagcagagcctagaacaagaagaagctgaacataaggccacaaaggcacgactagcagataaaaataagatctatgagtccatcgaagaagccaaatcagaagccatgaaagaaatggagaagaagctcttggaggaaagaactttaaaacagaaagtggagaacctattgctagaagctgagaaaagatgttctctattagactgtgacctcaaacagtcacagcagaaaataaatgagctccttaaacagaaagatgtgctaaatgaggatgttagaaacctgacattaaaaatagagcaagaaactcagaagcgctgccttacacaaaatgacctgaagatgcaaacacaacaggttaacacactaaaaatgtcagaaaagcagttaaagcaagaaaataaccatctcatggaaatgaaaatgaacttggaaaaacaaaatgctgaacttcgaaaagaacgtcaggatgcagatgggcaaatgaaagagctccaggatcagctcgaagcagaacagtatttctcaaccctttataaaacacaagttagggagcttaaagaagaatgtgaagaaaagaccaaacttggtaaagaattgcagcagaagaaacaggaattacaggatgaacgggactctttggctgcccaactggagatcaccttgaccaaagcagattctgagcaactggctcgttcaattgctgaagaacaatattctgatttggaaaaagagaagatcatgaaagagctggagatcaaagagatgatggctagacacaaacaggaacttacggaaaaagatgctacaattgcttctcttgaggaaactaataggacactaactagtgatgttgccaatcttgcaaatgagaaagaagaattaaataacaaattgaaagatgttcaagagcaactgtcaagattgaaagatgaagaaataagcgcagcagctattaaagcacagtttgagaagcagctattaacagaaagaacactcaaaactcaagctgtgaataagttggctgagatcatgaatcgaaaagaacctgtcaagcgtggtaatgacacagatgtgcggagaaaagagaaggagaatagaaagctacatatggagcttaaatctgaacgtgagaaattgacccagcagatgatcaagtatcagaaagaactgaatgaaatgcaggcacaaatagctgaagagagccagattcgaattgaactgcagatgacattggacagtaaagacagtgacattgagcagctgcggtcacaactccaagccttgcatattggtctggatagttccagtataggcagtggaccaggggatgctgaggcagatgatgggtttccagaatcaagattagaaggatggctttcattgcctgtacgaaacaacactaagaaatttggatgggttaaaaagtatgtgattgtaagcagtaagaagattcttttctatgacagtgaacaagataaagaacaatccaatccttacatggttttagatatagacaagttatttcatgtccgaccagttacacagacagatgtgtatagagcagatgctaaagaaattccaaggatattccagattctgtatgccaatgaaggagaaagtaagaaggaacaagaatttccagtggagccagttggagaaaaatctaattatatttgccacaagggacatgagtttattcctactctttatcatttcccaaccaactgtgaggcttgtatgaagcccctgtggcacatgtttaagcctcctcctgctttggagtgccgccgttgccatattaagtgtcataaagatcatatggacaaaaaggaggagattatagcaccttgcaaagtatattatgatatttcaacggcaaagaatctgttattactagcaaattctacagaagagcagcagaagtgggttagtcggttggtgaaaaagatacctaaaaagcccccagctccagacccttttgcccgatcatctcctagaacttcaatgaagatacagcaaaaccagtctattagacggccaagtcgacagcttgccccaaacaaacctagctaactgccttctatgaaagcagtcattattcaaggtgatcgtattcttccagtgaaaacaagactgaaatatgatggcccaaaatttattaaaaagctatattttcctgagagactgatacatacactcatacatatatgtgttccccttttccctgtaatataaattacaaatctgggctcctttgaagcaacaggttgaaccaacaatgattggttgatagactaaggatatatgcaactcttccagacttttccataaagctctctcggcagtcgctcacactacaatgcacacaaggattgagaagagttaaaggctaaagaaaacatcttttctagcttcaacagagaggtttcaccagcacatttaccagaagaatctgggaatggattccactacagtgatattgactgcatctttaagaagtgaccattatactgtgtatatatatataaacacacacacatatatatatatatatatagtactctaatactgcaagaaggttttttaaacttcccactttattttttatacacattaatcagatatcattacttgctgcagttgcaactatgcacttgtataaagccataatgttggagtttatatcactcattcctgtgtacctgatggaagttgcatgttcatgtttaagcagttactgtaacaagaagtttaaagttaattatatcagtttcctaatgcttcatgataggcaactttacccattttgaatgccttaatttaatttttttcaaagtctcagccctgtctgtattaaaaaacaaaaaaagcgtttaccagctcttaggatgtaaactagctttgtggaagataaatcgtgcactatttttacacataaatagttatatcaatgtcagcctattttgattaacaaatgtttttaaagtattattggttatagaaacaataatggatggtgttggaactaatatatccttgatgtctgtctattattcattcaactctttttacagacctcagtattagtctgtgactacaaaatattttatttgctttaaatttgctggctaccctagatgtgtttttattcctggtaaagacatttgtgattacattttcacacttaagattcaaaatttttcccaaatataaagaaaactaagacagactgtagatgcattttaaatatttaaatatgatcctcagacatgcagctgtgtgtggcagtattttagtaccgggttaagaaaactggcaactgggaagaagtggcctcaaaggcacttaatttgatttttattttttaaatgctgtcaaagttacagtttacgcaggacattcttgccgtattctcatgatcccagataagtgtgtgttttatactgcaacaatatgcagcaatggtaagcgtaaagttttttttttgtttttgtttttttttatattatgaagtcttttaacagtctctctttatataaatacacagagtttggtatgatatttaaatacatcatctggccaggcatggtggcttacgcctgtaatcctagcactttgggaggccaagacgggcggatcacctgaggtgaggagttcaagaccagcctgcccaacatagtgaaactccgtctctaccaatatacaaaaattagccgggcatgatggtggtggcctgtaatcccagctacttgggaggctgagacaggagaatcgcttgaacccaggagacggtggttgcagtgagcgaagatcgagccactgcactccagcctgggcagctgaacaagactccgtctc

SEQ ID NO: 282 - DNA, 541 bp, Homo sapiens
cttttcgatccgccatctgcggtggagccgccaccaaaatgcagattttcgtgaaaacccttacggggaagaccatcaccctcgaggttgaaccctcggatacgatagaaaatgtaaaggccaagatccaggataaggaaggaattcctcctgatcagcagagactgatctttgctggcaagcagctggaagatggacgtactttgtctgactacaatattcaaaaggagtctactcttcatcttgtgttgagacttcgtggtggtgctaagaaaaggaagaagaagtcttacaccactcccaagaagaataagcacaagagaaagaaggttaagctggctgtcctgaaatattataaggtggatgagaatggcaaaattagtcgccttcgtcgagagtgcccttctgatgaatgtggtgctggggtgtttatggcaagtcactttgacagacattattgtggcaaatgttgtctgacttactgtttcaacaaaccagaagacaagtaactgtatgagttaataaaagacatgaactaaca

SEQ ID NO: 283 - DNA, 3883 bp, Homo sapiens
ttggttgcgcggtactagcggtgcccgccgaagggggaggaggcgaggagcgagccgtgcggccagagcgggaaagagactcgtctttgcgtccgagttctggagccgccgcaccccgactcctggggccgcggcagcggctgcgaggggacgggcgtccgctgtctcctgggttcccctcgtagcgacccgcgggatcggaaaaaaaggagaagatggaggaggagggtggcagcagcggcggcgccgcggggaccagcgcggacggcggcgacggaggagagcagctcctcactgtcaagcacgagctgcggactgctaatttgacaggacatgctgagaaggtgggaatagaaaattttgagctcctgaaggtcctaggaactggagcttatggaaaagtatttctagttcgtaaaataagtggccatgatactggaaagctgtatgccatgaaagttttgaaaaaggcaacaatcgttcaaaaggccaaaaccacagagcatacaaggacagaacgacaagtcctggaacacattaggcagtcgccatttttggtaacattacattatgctttccagacagaaaccaaacttcatctcattttagattatataaatggtggtgaactttttactcatctttctcaaagagagcgtttcacagagcatgaggtgcagatttatgttggagagattgtgcttgccctcgaacatctccacaagttggggattatatatcgtgatattaagcttgagaatattctacttgattctaatggccatgtggtgctgacagattttggtctgagtaaggagtttgtggctgatgaaactgaaagagcatattccttttgtggaactattgaatacatggcaccagatattgtcagagggggagattcaggacatgacaaggcagttgactggtggagtttgggtgttctaatgtatgaattactaactggagcatctcctttcactgttgatggagaaaaaaattcccaagctgagatatctaggagaatattaaaaagtgagcctccatatccccaagaaatgagtgctttagcgaaagacctaattcagcgtcttttgatgaaagatcccaagaagagattgggatgtggtccacgtgatgcagatgaaatcaaagaacatctcttctttcagaaaataaattgggatgatttagccgccaaaaaagtgcctgcaccatttaagccagtcattcgagatgaattagatgtgagtaactttgcagaagagttcacagaaatggatcccacttattctcccgcagccctgccccagagttctgagaagctgtttcagggctattcctttgttgctccttccatcctattcaagcgtaatgcagctgtcatagaccctcttcagtttcacatgggagttgaacgtcctggagtgacaaatgttgccaggagtgcaatgatgaaggactctccattctatcaacactatgacctagatttgaaggacaaacccctgggagaaggtagtttttcaatttgtcgaaagtgtgtgcataaaaaaagtaaccaagcttttgcagtcaaaataatcagcaaaaggatggaagccaatactcaaaaggaaataacagctctgaaactctgtgaaggacaccccaatattgtgaagttgcatgaagtttttcatgatcagcttcacacgtttctagtgatggaacttctgaatggaggagaactgtttgagcgcattaagaaaaagaagcacttcagtgagacggaagccagctacatcatgaggaagcttgtttcagctgtaagccacatgcatgatgttggagtggtgcacagggatctgaaacctgagaatttattgttcaccgatgaaaatgacaatttggaaattaaaataattgattttggatttgcacggctaaagccaccggataatcagcccctgaagactccatgcttcacccttcattatgccgccccagagctcttgaatcagaacggctacgatgagtcctgtgacctgtggagcttgggcgtcattttgtacacaatgttgtcaggacaggttcccttccaatctcatgaccgaagtttgacgtgtaccagcgcggtggaaatcatgaagaaaattaaaaagggagatttctcctttgaaggagaagcctggaagaatgtatcccaagaggctaaagatttgatccaaggacttctcacagtagatccaaacaaaaggcttaaaatgtctggcttgaggtacaatgaatggctacaagatggaagtcagctgtcctccaatcctctgatgactccggatattctaggatcttccggagctgccgtgcatacctgtgtgaaagcaaccttccacgcctttaacaaatacaagagagaggggttttgccttcagaatgttgataaggcccctttggctaagagaagaaaaatgaaaaagactagcaccagtaccgagacgcgcagcagttccagtgagagttcccattcttcttcctctcattctcacggtaaaactacacccaccaagacactgcagcccagcaatcctgccgacagcaataacccggagaccctcttccagttctcggactcagtagcttaggcatggtaggagtgtatcagtgatccattgcacctttattccctcagcatatgcctgaggcgatcttttatgcttttaaaaatgtttcccgttggtctcattggaatctgcctcctaatgatttttttcaggaaaacctgtttggttatcctcattcaaaagcactggacagagaatgttactgtgaatagagcacatattactctttttagcaacctagcatgatgccaacaagactattcttgaaagagcaaaggttcctgtaaatttaattagggctagatttgagctgcttgtaagtcacaggttttccagatgtctgccaacaagaaatgactcatactgtgatgataccttttgctttgccttgtggacaatgtgggtttttgaaatttgcacccttcaaacaatgatttatcagagaaaggggtctgttttcaaaaaagattctgtaatgaattttatgtgtggcatatacttatttcttgagagaagattttaacttattgtttttattttatggttacatatgatgataacctgctattattaaactttttctaaaaagtgaaaaaaaaaaaaaaagatataagaactcaaggtcccatactctgtattcgggatccatctgagatgcatgctaagctatgtgtatgtttttaattttgcactgctctttcctggcaatttgttttaatggttattgcagaatattaaggtacatgtctctctgttttaagtaatattgcactttataaaaaagtatgaataaagcaaactattttataaagtgcactgtttaaagcatttgcactgtatttttgccatttattttcattttctactttaaatttgtcctcacattcctcttctactttgtatgcaacaagtagaatggggcatgttgtgtcatgtagtcagccacttatgcaccaatgtgaggaaaacctaaagggaaattaaactaaacactgtgcttcatatttgtacactgtgttgtactacagtgaggaatttcctcctgtagtcatatattatgtacataatattttagaatcatacctatgacttgtttggaaatttttctgttaaattttaaatccagaaagcatattttataaacttatgcagagcacttttattgctcaaaagttctgaattcatacagaaaacaagtactatgtgatgaaaacatttcattaaaagattgctgcatttaaaaatacaattaattcgttccctatgcaaaaaaaaaaaaa

SEQ ID NO: 284 - DNA, 1750 bp, Homo sapiens
tggtaactcaggcgccgggcgcactgtccgtagctgctggttttccacgctggttttagctcccggcgtctgcaaaatgaagattgaggaggtgaagagcactacgaagacgcagcgcatcgcctcccacagccacgtgaaagggctggggctggacgagagcggcttggccaagcaggcggcctcagggcttgtgggccaggagaacgcgcgagaggcatgtggcgtcatagtagaattaatcaaaagcaagaaaatggctggaagagctgtcttgttggcaggacctcctggaactggcaagacagctctggctctggctattgctcaggagctgggtagtaaggtccccttctgcccaatggtggggagtgaagtttactcaactgagatcaagaagacagaggtgctgatggagaacttccgcagggccattgggctgcgaataaaggagaccaaggaagtttatgaaggtgaagtcacagagctaactccgtgtgagacagagaatcccatgggaggatatggcaaaaccattagccatgtgatcataggactcaaaacagccaaaggaaccaaacagttgaaactggaccccagcatttttgaaagtttgcagaaagagcgagtagaagctggagatgtgatttacattgaagccaacagtggggccgtgaagaggcagggcaggtgtgatacctatgccacagaattcgaccttgaagctgaagagtatgtccccttgccaaaaggggatgtgcacaaaaagaaagaaatcatccaagatgtgaccttgcatgacttggatgtggctaatgcgcggccccaggggggacaagatatcctgtccatgatgggccagctaatgaagccaaagaagacagaaatcacagacaaacttcgaggggagattaataaggtggtgaacaagtacatcgaccagggcattgctgagctggtcccgggtgtgctgtttgttgatgaggtccacatgctggacattgagtgcttcacctacctgcaccgcgccctggagtcttctatcgctcccatcgtcatctttgcatccaaccgaggcaactgtgtcatcagaggcactgaggacatcacatcccctcacggcatccctcttgaccttctggaccgagtgatgataatccggaccatgctgtatactccacaggaaatgaaacagatcattaaaatccgtgcccagacggaaggaatcaacatcagtgaggaggcactgaaccacctgggggagattggcaccaagaccacactgaggtactcagtgcagctgctgaccccggccaacttgcttgctaaaatcaacgggaaggacagcattgagaaagagcatgtcgaagagatcagtgaacttttctatgatgccaagtcctccgccaaaatcctggctgaccagcaggataagtacatgaagtgagatggctgaggttttcagcagcaagagactccccaggtgtgcctggcctgggtccagcctgtgggcgcttgcccctgggcttggggctgccgtccccactcaggcgtgggctgcagcgctgtcagttcagtgtggaaagcatttctttttaagttatcgtaactgttcctgtggttgctttgaaagaacccttccttacctggtgtgttttctataaatcttcataggttattttgattcttctctctctctctctaagttttttaaaaataaacttttcagaacagttaaaaaaaaaaaaaa

SEQ ID NO: 285 - DNA, 1488 bp, Homo sapiens
gttggtgagcatcatggcaaccgttacagccacaaccaaagtcccggagatccgtgatgtaacaaggattgagcgaatcggtgcccactcccacatccggggactggggctggacgatgccttggagcctcggcaggcttcgcaaggcatggtgggtcagctggcggcacggcgggcggctggcgtggtgctggagatgatccgggaagggaagattgccggtcgggcagtccttattgctggccagccgggcacggggaagacggccatcgccatgggcatggcgcaggccctgggccctgacacgccattcacagccatcgccggcagtgaaatcttctccctggagatgagcaagaccgaggcgctgacgcaggccttccggcggtccatcggcgttcgcatcaaggaggagacggagatcatcgaaggggaggtggtggagatccagattgatcgaccagcaacagggacgggctccaaggtgggcaaactgaccctcaagaccacagagatggagaccatctacgacctgggcaccaagatgattgagtccctgaccaaggacaaggtccaggccggggacgtgatcaccatcgacaaggcgacgggcaagatctccaagctgggccgctccttcacacgcgcccgcgactacgacgctatgggctcccagaccaagttcgtgcagtgcccagatggggagctccagaaacgcaaggaggtggtgcacaccgtgtccctgcacgagatcgacgtcatcaactctcgcacccagggcttcctggcgctcttctcaggtgacacaggggagatcaagtcagaagtccgtgagcagatcaatgccaaggtggctgagtggcgcgaggagggcaaggcggagatcatccctggagtgctgttcatcgacgaggtccacatgctggacatcgagagcttctccttcctcaaccgggccctggagagtgacatggcgcctgtcctgatcatggccaccaaccgtggcatcacgcgaatccggggcaccagctaccagagccctcacggcatccccatagacctgctggaccggctgcttatcgtctccaccaccccctacagcgagaaagacacgaagcagatcctccgcatccggtgcgaggaagaagatgtggagatgagtgaggacgcctacacggtgctgacccgcatcgggctggagacgtcactgcgctacgccatccagctcatcacagctgccagcttggtgtgccggaaacgcaagggtacagaagtgcaggtggatgacatcaagcgggtctactcactcttcctggacgagtcccgctccacgcagtacatgaaggagtaccaggacgccttcctcttcaacgaactcaaaggcgagaccatggacacctcctgagttggatgtcatcccccgaccccaccctgttttccaccagagttctgacactgtgactctgtataaaatggttgggaagctgc

SEQ ID NO: 286 - DNA, 3207 bp, Homo sapiens
gggcctctggtagccctggggacgctgtatctgtgggctcttgaatcgcgtcacaaatcagcgaccgaactctggcggtggtggttaagacggcgaaggcggcagcggcggcgacagctctggggtttgcgtctcggggtgtgtcggccgccgctgctgcttgggcctggtatgtacagatggctggttaggattctcggcaccattttccgtttctgcgaccggtcggtgccccctgcccgggccctcctgaagaggcggcgctcagacagcactctgttttctacagtggacactgatgaaataccagccaaaagaccaagattagattgctttattcaccaagtgaaaaacagtctctacaatgctgccagcttatttggattcccattccagctgaccacaaagcccatggtaacttctgcttgtaatggaacacggaatgtggccccttcaggagaggtattttcgaactcttcatcttgtgaactgacaggttctggatcctggaacaacatgctgaaactgggtaataaatctcctaatggaataagtgactatccaaagatcagagtgacagttacccgagatcagccacgcagagtcctgccttcctttggttttactttgaactcagaaggctgtaatagaagaccaggtggccgtcgccatagcaaaggtaatccagagagttctttaatgtggaaacctcaggaacaggctgtaacagagatgatttctgaagagagtggcaagggtctgaggcgtccccattgtactgtggaggagggtgttcaaaaagaggaaagagagaagtaccgaaagttattggaacgacttaaagaaagtggtcatggaaactctgtctgtcctgtaacttcaaattatcacagttctcaaagaagtcagatggacacattaaagaccaaaggctggggggaagagcaaaatcacggagtcaaaacaactcagtttgttccaaaacaatatagacttgttgaaacaaggggacctctatgttcattgagaagtgaaaagaggtgttcaaaggggaaaattactgatacagagacgatggtcggaatcagatttgaaaatgaaagtaggaggggataccaactggagcctgacctatcagaagaagtgtcggcccgactccgcctgggcagtggaagcaatggcttactcaggaggaaagtgtcaataattgagacaaaggaaaagaattgctcaggcaaagagagggacagaagaacggacgatctccttgaacttacagaggacatggaaaaggaaatcagtaatgccctaggccatggcccacaggatgaaatcctaagtagtgctttcaaattgcgaattactcgaggagatattcagacattaaagaactatcactggctcaatgatgaagtcattaatttttacatgaatcttctggtggaaagaaataaaaagcaaggctatccagcacttcatgtattcagtactttcttctatcctaaattaaagtctgggggttaccaagcagtgaaacgatggaccaaaggggtaaatctctttgaacaagaaattattctggtgcctattcatcggaaggtacattggagcctggtggtgattgacctaagaaaaaagtgtcttaaatatctggattctatgggacaaaagggccacaggatctgtgagattctccttcagtatttacaggatgaaagtaagaccaaaagaaatagtgatctgaatcttttagagtggacccatcacagcatgaaaccacacgagattcctcaacagctgaatgggagtgattgtggaatgtttacttgtaaatatgcagattatatttctagggacaaacctatcacatttactcagcaccagatgcctctcttccggaagaagatggtgtgggaaatccttcatcagcagttgctgtgagaaaactttgcctggtccctctagctgctggtggttctttcacagacatttccatatacctcatgcattgtgggttaaaaagtccctgcatcacttctgttctcacaggtactgagctgtcaaaagtgcatgaaggcctctcactgtactctagtcctgacttggggtgcagagggctgcttgcaatcctgtttgtaaggctgtgcctgctcagagctttggactgttcaacccacacaagaacaaacgctaactaatattttttttaagagattcttttccctatgaatgtgggaaatgcaggatttattctgtgaattgtttgtttctgtgtgtttgttcagcgtattcattcactcactcgtttgcaaacataatgggcagtggtcatttactgctgctcttttacagttagctctaaattacttgtttgaactatttatttctgaaaggaatgttactcaagctgccactccctgctgaagagcaggagggaactctcactgggggcggaaggaagtggagctggagcagtaactgccaacatgaagctggagggtttgggattttttttgtttttgtttttttgaggctcaaaaaatgctgggagaaatgaaaatgctgtgggatagggctcctgttgcctttcagaggaagtctgacactacagcgttggcacagtgccgtgaacagtggaactgtgcccaagggactctgattatccaagcatcttccgaagagtgttgtggtcaccttaaagagacttccccttctggaaatgtggtgacttggcttagtcttcaaactggattcatggatttgaagtaactgtaaaccctaaatcttcattttcatcccagatctggttgagtataaacctcagaattgtaggggctggcctgagctgtttatttcaaaagatactattcaatttaaagctatttttcctcagagtttttgttttctatatattaagtctaaattaagttttctactcattaagactaacatctccccactccatccccactgaaatttgtggaagaaaatttagtacttggctctgaggttgccagttatacaataatctattttgcatatgaaagtttgtatttaacttttttgttcattaaaaaccttactgatatggttataacttcagacagtttagagttggtcagaacatattttgcaagatctagtgcctagtgttgcttttctgatgtaataaaaggtggtctggcagaacctaaaaaaaaaaaaaaa

SEQ ID NO: 287 - DNA, 2876 bp, Homo sapiens
gaattcctgcagctcagcagccgccgccagagcaggacgaaccgccaatcgcaaggcacctctgagaacttcaggatgcagatgtctccagccctcacctgcctagtcctgggcctggcccttgtctttggtgaagggtctgctgtgcaccatcccccatcctacgtggcccacctggcctcagacttcggggtgagggtgtttcagcaggtggcgcaggcctccaaggaccgcaacgtggttttctcaccctatggggtggcctcggtgttggccatgctccagctgacaacaggaggagaaacccagcagcagattcaagcagctatgggattcaagattgatgacaagggcatggcccccgccctccggcatctgtacaaggagctcatggggccatggaacaaggatgagatcagcaccacagacgcgatcttcgtccagcgggatctgaagctggtccagggcttcatgccccacttcttcaggctgttccggagcacggtcaagcaagtggacttttcagaggtggagagagccagattcatcatcaatgactgggtgaagacacacacaaaaggtatgatcagcaacttgcttgggaaaggagccgtggaccagctgacacggctggtgctggtgaatgccctctacttcaacggccagtggaagactcccttccccgactccagcacccaccgccgcctcttccacaaatcagacggcagcactgtctctgtgcccatgatggctcagaccaacaagttcaactatactgagttcaccacgcccgatggccattactacgacatcctggaactgccctaccacggggacaccctcagcatgttcattgctgccccttatgaaaaagaggtgcctctctctgccctcaccaacattctgagtgcccagctcatcagccactggaaaggcaacatgaccaggctgccccgcctcctggttctgcccaagttctccctggagactgaagtcgacctcaggaagcccctagagaacctgggaatgaccgacatgttcagacagtttcaggctgacttcacgagtctttcagaccaagagcctctccacgtcgcgcaggcgctgcagaaagtgaagatcgaggtgaacgagagtggcacggtggcctcctcatccacagctgtcatagtctcagcccgcatggcccccgaggagatcatcatggacagacccttcctctttgtggtccggcacaaccccacaggaacagtccttttcatgggccaagtgatggaaccctgaccctggggaaagacgccttcatctgggacaaaactggagatgcatcgggaaagaagaaactccgaagaaaagaattttagtgttaatgactctttctgaaggaagagaagacatttgccttttgttaaaagatggtaaaccagatctgtctccaagaccttggcctctccttggaggacctttaggtcaaactccctagtctccacctgagaccctgggagagaagtttgaagcacaactcccttaaggtctccaaaccagacggtgacgcctgcgggaccatctggggcacctgcttccacccgtctctctgcccactcgggtctgcagacctggttcccactgaggccctttgcaggatggaactacggggcttacaggagcttttgtgtgcctggtagaaactatttctgttccagtcacattgccatcactcttgtactgcctgccaccgcggaggaggctggtgacaggccaaaggccagtggaagaaacaccctttcatctcagagtccactgtggcactggccacccctccccagtacaggggtgctgcaggtggcagagtgaatgtcccccatcatgtggcccaactctcctggcctggccatctccctccccagaaacagtgtgcatgggttattttggagtgtaggtgacttgtttactcattgaagcagatttctgcttccttttatttttataggaatagaggaagaaatgtcagatgcgtgcccagctcttcaccccccaatctcttggtggggaggggtgtacctaaatatttatcatatccttgcccttgagtgcttgttagagagaaagagaactactaaggaaaataatattatttaaactcgctcctagtgtttctttgtggtctgtgtcaccgtatctcaggaagtccagccacttgactggcacacacccctccggacatccagcgtgacggagcccacactgccaccttgtggccgcctgagaccctcgcgccccccgcgccccccgcgcccctctttttccccttgatggaaattgaccatacaatttcatcctccttcaggggatcaaaaggacggagtggggggacagagactcagatgaggacagagtggtttccaatgtgttcaatagatttaggagcagaaatgcaaggggctgcatgacctaccaggacagaactttccccaattacagggtgactcacagccgcattggtgactcacttcaatgtgtcatttccggctgctgtgtgtgagcagtggacacgtgaggggggggtgggtgagagagacaggcagctcggattcaactaccttagataatatttctgaaaacctaccagccagagggtagggcacaaagatggatgtaatgcactttgggaggccaaggcgggaggattgcttgagcccaggagttcaagaccagcctgggcaacataccaagacccccgtctctttaaaaatatatatattttaaatatacttaaatatatatttctaatatctttaaatatatatatatattttaaagaccaatttatgggagaattgcacacagatgtgaaatgaatgtaatctaatagaagc

SEQ ID NO: 288 - DNA, 1984 bp, Homo sapiens
ctgatttacaggaactcacaccagcgatcaatcttccttaatttgtaactgggcagtgtcccgggccagccaatagctaagactgccccccccgcaccccaccctccctgaccctgggggactctctactcagtctgcactggagctgcctggtgaccagaagtttggagtccgctgacgtcgccgcccagatggcctccaggctgaccctgctgaccctcctgctgctgctgctggctggggatagagcctcctcaaatccaaatgctaccagctccagctcccaggatccagagagtttgcaagacagaggcgaagggaaggtcgcaacaacagttatctccaagatgctattcgttgaacccatcctggaggtttccagcttgccgacaaccaactcaacaaccaattcagccaccaaaataacagctaataccactgatgaacccaccacacaacccaccacagagcccaccacccaacccaccatccaacccacccaaccaactacccagctcccaacagattctcctacccagcccactactgggtccttctgcccaggacctgttactctctgctctgacttggagagtcattcaacagaggccgtgttgggggatgctttggtagatttctccctgaagctctaccacgccttctcagcaatgaagaaggtggagaccaacatggccttttccccattcagcatcgccagcctccttacccaggtcctgctcggggctggggagaacaccaaaacaaacctggagagcatcctctcttaccccaaggacttcacctgtgtccaccaggccctgaagggcttcacgaccaaaggtgtcacctcagtctctcagatcttccacagcccagacctggccataagggacacctttgtgaatgcctctcggaccctgtacagcagcagccccagagtcctaagcaacaacagtgacgccaacttggagctcatcaacacctgggtggccaagaacaccaacaacaagatcagccggctgctagacagtctgccctccgatacccgccttgtcctcctcaatgctatctacctgagtgccaagtggaagacaacatttgatcccaagaaaaccagaatggaaccctttcacttcaaaaactcagttataaaagtgcccatgatgaatagcaagaagtaccctgtggcccatttcattgaccaaactttgaaagccaaggtggggcagctgcagctctcccacaatctgagtttggtgatcctggtaccccagaacctgaaacatcgtcttgaagacatggaacaggctctcagcccttctgttttcaaggccatcatggagaaactggagatgtccaagttccagcccactctcctaacactaccccgcatcaaagtgacgaccagccaggatatgctctcaatcatggagaaattggaattcttcgatttttcttatgaccttaacctgtgtgggctgacagaggacccagatcttcaggtttctgcgatgcagcaccagacagtgctggaactgacagagactggggtggaggcggctgcagcctccgccatctctgtggcccgcaccctgctggtctttgaagtgcagcagcccttcctcttcgtgctctgggaccagcagcacaagttccctgtcttcatggggcgagtatatgaccccagggcctgagacctgcaggatcaggttagggcgagcgctacctctccagcctcagctctcagttgcagccctgctgctgcctgcctggacttggcccctgccacctcctgcctcaggtgtccgctatccaccaaaagggctccctgagggtctgggcaagggacctgcttctattagcccttctccatggccctgccatgctctccaaaccactttttgcagctttctctagttcaagttcaccagactctataaataaaacctgacagaccatgactttcaaaaaaaaaaaaaaaaaa

SEQ ID NO: 289 - DNA, 4465 bp, Homo sapiens
cctgcagcctccggagtcagtgccgcgcgcccgccgccccgcgccttcctgctcgccgcacctccgggagccggggcgcacccagcccgcagcgccgcctccccgcccgcgccgcctccgaccgcaggccgagggccgccactggccggggggaccgggcagcagcttgcggccgcggagccgggcaacgctggggactgcgccttttgtccccggaggtccctggaagtttgcggcaggacgcgcgcggggaggcggcggaggcagccccgacgtcgcggagaacagggcgcagagccggcatgggcatcgggcgcagcgaggggggccgccgcggggcagccctgggcgtgctgctggcgctgggcgcggcgcttctggccgtgggctcggccagcgagtacgactacgtgagcttccagtcggacatcggcccgtaccagagcgggcgcttctacaccaagccacctcagtgcgtggacatccccgcggacctgcggctgtgccacaacgtgggctacaagaagatggtgctgcccaacctgctggagcacgagaccatggcggaggtgaagcagcaggccagcagctgggtgcccctgctcaacaagaactgccacgccggcacccaggtcttcctctgctcgctcttcgcgcccgtctgcctggaccggcccatctacccgtgtcgctggctctgcgaggccgtgcgcgactcgtgcgagccggtcatgcagttcttcggcttctactggcccgagatgcttaagtgtgacaagttccccgagggggacgtctgcatcgccatgacgccgcccaatgccaccgaagcctccaagccccaaggcacaacggtgtgtcctccctgtgacaacgagttgaaatctgaggccatcattgaacatctctgtgccagcgagtttgcactgaggatgaaaataaaagaagtgaaaaaagaaaatggcgacaagaagattgtccccaagaagaagaagcccctgaagttggggcccatcaagaagaaggacctgaagaagcttgtgctgtacctgaagaatggggctgactgtccctgccaccagctggacaacctcagccaccacttcctcatcatgggccgcaaggtgaagagccagtacttgctgacggccatccacaagtgggacaagaaaaacaaggagttcaaaaacttcatgaagaaaatgaaaaaccatgagtgccccacctttcagtccgtgtttaagtgattctcccgggggcagggtggggagggagcctcgggtggggtgggagcgggggggacagtgccccgggaacccggtgggtcacacacacgcactgcgcctgtcagtagtggacattgtaatccagtcggcttgttcttgcagcattcccgctcccttccctccatagccacgctccaaaccccagggtagccatggccgggtaaagcaagggccatttagattaggaaggtttttaagatccgcaatgtggagcagcagccactgcacaggaggaggtgacaaaccatttccaacagcaacacagccactaaaacacaaaaagggggattgggcggaaagtgagagccagcagcaaaaactacattttgcaacttgttggtgtggatctattggctgatctatgcctttcaactagaaaattctaatgattggcaagtcacgttgttttcaggtccagagtagtttctttctgtctgctttaaatggaaacagactcataccacacttacaattaaggtcaagcccagaaagtgataagtgcagggaggaaaagtgcaagtccattatgtaatagtgacagcaaagggaccaggggagaggcattgccttctctgcccacagtctttccgtgtgattgtctttgaatctgaatcagccagtctcagatgccccaaagtttcggttcctatgagcccggggcatgatctgatccccaagacatgtggaggggcagcctgtgcctgcctttgtgtcagaaaaaggaaaccacagtgagcctgagagagacggcgattttcgggctgagaaggcagtagttttcaaaacacatagttaaaaaagaaacaaatgaaaaaaattttagaacagtccagcaaattgctagtcagggtgaattgtgaaattgggtgaagagcttaggattctaatctcatgttttttccttttcacatttttaaaagaacaatgacaaacacccacttatttttcaaggttttaaaacagtctacattgagcatttgaaaggtgtgctagaacaaggtctcctgatccgtccgaggctgcttcccagaggagcagctctccccaggcatttgccaagggaggcggatttccctggtagtgtagctgtgtggctttccttcctgaagagtccgtggttgccctagaacctaacaccccctagcaaaactcacagagctttccgtttttttctttcctgtaaagaaacatttcctttgaacttgattgcctatggatcaaagaaattcagaacagcctgcctgtccccccgcactttttacatatatttgtttcatttctgcagatggaaagttgacatgggtggggtgtccccatccagcgagagagtttcaaaagcaaaacatctctgcagtttttcccaagtaccctgagatacttcccaaagcccttatgtttaatcagcgatgtatataagccagttcacttagacaactttacccttcttgtccaatgtacaggaagtagttctaaaaaaaatgcatattaatttcttcccccaaagccggattcttaattctctgcaacactttgaggacatttatgattgtccctctgggccaatgcttatacccagtgaggatgctgcagtgaggctgtaaagtggccccctgcggccctagcctgacccggaggaaaggatggtagattctgttaactcttgaagactccagtatgaaaatcagcatgcccgcctagttacctaccggagagttatcctgataaattaacctctcacagttagtgatcctgtccttttaacaccttttttgtggggttctctctgacctttcatcgtaaagtgctggggaccttaagtgatttgcctgtaattttggatgattaaaaaatgtgtatatatattagctaattagaaatattctacttctctgttgtcaaactgaaattcagagcaagttcctgagtgcgtggatctgggtcttagttctggttgattcactcaagagttcagtgctcatacgtatctgctcattttgacaaagtgcctcatgcaaccgggccctctctctgcggcagagtccttagtggaggggtttacctggaacattagtagttaccacagaatacggaagagcaggtgactgtgctgtgcagctctctaaatgggaattctcaggtaggaagcaacagcttcagaaagagctcaaaataaattggaaatgtgaatcgcagctgtgggttttaccaccgtctgtctcagagtcccaggaccttgagtgtcattagttactttattgaaggttttagacccatagcagctttgtctctgtcacatcagcaatttcagaaccaaaagggaggctctctgtaggcacagagctgcactatcacgagcctttgtttttctccacaaagtatctaacaaaaccaatgtgcagactgattggcctggtcattggtctccgagagaggaggtttgcctgtgatttcctaattatcgctagggccaaggtgggatttgtaaagctttacaataatcattctggatagagtcctgggaggtccttggcagaactcagttaaatctttgaagaatatttgtagttatcttagaagatagcatgggaggtgaggattccaaaaacattttatttttaaaatatcctgtgtaacacttggctcttggtacctgtgggttagcatcaagttctccccagggtagaattcaatcagagctccagtttgcatttggatgtgtaaattacagtaatcccatttcccaaacctaaaatctgtttttctcatcagactctgagtaactggttgctgtgtcataacttcatagatgcaggaggctcaggtgatctgtttgaggagagcaccctaggcagcctgcagggaataacatactggccgttctgacctgttgccagcagatacacaggacatggatgaaattcccgtttcctctagtttcttcctgtagtactcctcttttagatcctaagtctcttacaaaagctttgaatactgtgaaaatgttttacattccatttcatttgtgttgtttttttaactgcattttaccagatgttttgatgttatcgcttatgttaatagtaattcccgtacgtgttcattttattttcatgctttttcagccatgtatcaatattcacttgactaaaatcactcaattaatcaatgaaaaaaaaaaa

SEQ ID NO: 290 - DNA, 2005 bp, Homo sapiens
caacggctcattctgctcccccgggtcggagccccccggagctgcgcgcgggcttgcagcgcctcgcccgcgctgtcctcccggtgtcccgcttctccgcgccccagccgccggctgccagcttttcggggccccgagtcgcacccagcgaagagagcgggcccgggacaagctcgaactccggccgcctcgcccttccccggctccgctccctctgccccctcggggtcgcgcgcccacgatgctgcagggccctggctcgctgctgctgctcttcctcgcctcgcactgctgcctgggctcggcgcgcgggctcttcctctttggccagcccgacttctcctacaagcgcagcaattgcaagcccatccctgccaacctgcagctgtgccacggcatcgaataccagaacatgcggctgcccaacctgctgggccacgagaccatgaaggaggtgctggagcaggccggcgcttggatcccgctggtcatgaagcagtgccacccggacaccaagaagttcctgtgctcgctcttcgcccccgtctgcctcgatgacctagacgagaccatccagccatgccactcgctctgcgtgcaggtgaaggaccgctgcgccccggtcatgtccgccttcggcttcccctggcccgacatgcttgagtgcgaccgtttcccccaggacaacgacctttgcatccccctcgctagcagcgaccacctcctgccagccaccgaggaagctccaaaggtatgtgaagcctgcaaaaataaaaatgatgatgacaacgacataatggaaacgctttgtaaaaatgattttgcactgaaaataaaagtgaaggagataacctacatcaaccgagataccaaaatcatcctggagaccaagagcaagaccatttacaagctgaacggtgtgtccgaaagggacctgaagaaatcggtgctgtggctcaaagacagcttgcagtgcacctgtgaggagatgaacgacatcaacgcgccctatctggtcatgggacagaaacagggtggggagctggtgatcacctcggtgaagcggtggcagaaggggcagagagagttcaagcgcatctcccgcagcatccgcaagctgcagtgctagtcccggcatcctgatggctccgacaggcctgctccagagcacggctgaccatttctgctccgggatctcagctcccgttccccaagcacactcctagctgctccagtctcagcctgggcagcttccccctgccttttgcacgtttgcatccccagcatttcctgagttataaggccacaggagtggatagctgttttcacctaaaggaaaagcccacccgaatcttgtagaaatattcaaactaataaaatcatgaatatttttatgaagtttaaaaatagctcactttaaagctagttttgaataggtgcaactgtgacttgggtctggttggttgttgtttgttgttttgagtcagctgattttcacttcccactgaggttgtcataacatgcaaattgcttcaattttctctgtggcccaaacttgtgggtcacaaaccctgttgagataaagctggctgttatctcaacatcttcatcagctccagactgagactcagtgtctaagtcttacaacaattcatcattttataccttcaatgggaacttaaactgttacatgtatcacattccagctacaatacttccatttattagaagcacattaaccatttctatagcatgatttcttcaagtaaaaggcaaaagatataaattttataattgacttgagtactttaagccttgtttaaaacatttcttacttaacttttgcaaattaaacccattgtagcttacctgtaatatacatagtagtttacctttaaaagttgtaaaaatattgctttaaccaacactgtaaatatttcagataaacattatattcttgtatataaactttacatcctgttttacctataaaaaaaaaaaaaaa

SEQ ID NO: 291 - DNA, 2820 bp, Homo sapiens
ggcgggttcgcgccccgaaggctgagagctggcgctgctcgtgccctgtgtgccagacggcggagctccgcggccggaccccgcggccccgctttgctgccgactggagtttgggggaagaaactctcctgcgccccagaagatttcttcctcggcgaagggacagcgaaagatgagggtggcaggaagagaaggcgctttctgtctgccggggtcgcagcgcgagagggcagtgccatgttcctctccatcctagtggcgctgtgcctgtggctgcacctggcgctgggcgtgcgcggcgcgccctgcgaggcggtgcgcatccctatgtgccggcacatgccctggaacatcacgcggatgcccaaccacctgcaccacagcacgcaggagaacgccatcctggccatcgagcagtacgaggagctggtggacgtgaactgcagcgccgtgctgcgcttcttcttctgtgccatgtacgcgcccatttgcaccctggagttcctgcacgaccctatcaagccgtgcaagtcggtgtgccaacgcgcgcgcgacgactgcgagcccctcatgaagatgtacaaccacagctggcccgaaagcctggcctgcgacgagctgcctgtctatgaccgtggcgtgtgcatttcgcctgaagccatcgtcacggacctcccggaggatgttaagtggatagacatcacaccagacatgatggtacaggaaaggcctcttgatgttgactgtaaacgcctaagccccgatcggtgcaagtgtaaaaaggtgaagccaactttggcaacgtatctcagcaaaaactacagctatgttattcatgccaaaataaaagctgtgcagaggagtggctgcaatgaggtcacaacggtggtggatgtaaaagagatcttcaagtcctcatcacccatccctcgaactcaagtcccgctcattacaaattcttcttgccagtgtccacacatcctgccccatcaagatgttctcatcatgtgttacgagtggcgttcaaggatgatgcttcttgaaaattgcttagttgaaaaatggagagatcagcttagtaaaagatccatacagtgggaagagaggctgcaggaacagcggagaacagttcaggacaagaagaaaacagccgggcgcaccagtcgtagtaatccccccaaaccaaagggaaagcctcctgctcccaaaccagccagtcccaagaagaacattaaaactaggagtgcccagaagagaacaaacccgaaaagagtgtgagctaactagtttccaaagcggagacttccgacttccttacaggatgaggctgggcattgcctgggacagcctatgtaaggccatgtgccccttgccctaacaactcactgcagtgctcttcatagacacatcttgcagcatttttcttaaggctatgcttcagtttttctttgtaagccatcacaagccatagtggtaggtttgccctttggtacagaaggtgagttaaagctggtggaaaaggcttattgcattgcattcagagtaacctgtgtgcatactctagaagagtagggaaaataatgcttgttacaattcgacctaatatgtgcattgtaaaataaatgccatatttcaaacaaaacacgtaatttttttacagtatgttttattaccttttgatatctgttgttgcaatgttagtgatgttttaaaatgtgatgaaaatataatgtttttaagaaggaacagtagtggaatgaatgttaaaagatctttatgtgtttatggtctgcagaaggatttttgtgatgaaaggggattttttgaaaaattagagaagtagcatatggaaaattataatgtgtttttttaccaatgacttcagtttctgtttttagctagaaacttaaaaacaaaaataataataaagaaaaataaataaaaaggagaggcagacaatgtctggattcctgttttttggttacctgatttccatgatcatgatgcttcttgtcaacaccctcttaagcagcaccagaaacagtgagtttgtctgtaccattaggagttaggtactaattagttggctaatgctcaagtattttatacccacaagagaggtatgtcactcatcttacttcccaggacatccaccctgagaataatttgacaagcttaaaaatggccttcatgtgagtgccaaattttgtttttcttcatttaaatattttctttgcctaaatacatgtgagaggagttaaatataaatgtacagagaggaaagttgagttccacctctgaaatgagaattacttgacagttgggatactttaatcagaaaaaaagaacttatttgcagcattttatcaacaaatttcataattgtggacaattggaggcatttattttaaaaaacaattttattggccttttgctaacacagtaagcatgtattttataaggcattcaataaatgcacaacgcccaaaggaaataaaatcctatctaatcctactctccactacacagaggtaatcactattagtattttggcatattattctccaggtgtttgcttatgcacttataaaatgatttgaacaaataaaactaggaacctgtatacatgtgtttcataacctgcctcctttgcttggccctttattgagataagttttcctgtcaagaaagcagaaaccatctcatttctaacagctgtgttatattccatagtatgcattactcaacaaactgttgtgctattggatacttaggtggtttcttcactgacaatactgaataaacatctcaccggaattc

SEQ ID NO: 292 - DNA, 1905 bp, Homo sapiens
gaggcgccaggatcagtcggggcacccgcagcgcaggctgccacccacctgggcgacctccgcggcggcggcggcggcggctgggtagagtcagggccgggggcgcacgccggaacacctgggccgccgggcaccgagcgtcggggggctgcgcggcgcgaccctggagagggcgcagccgatgcgggcggcggcggcggcggggggcgtgcggacggccgcgctggcgctgctgctgggggcgctgcactgggcgccggcgcgctgcgaggagtacgactactatggctggcaggccgagccgctgcacggccgctcctactccaagccgccgcagtgccttgacatccctgccgacctgccgctctgccacacggtgggctacaagcgcatgcggctgcccaacctgctggagcacgagagcctggccgaagtgaagcagcaggcgagcagctggctgccgctgctggccaagcgctgccactcggatacgcaggtcttcctgtgctcgctctttgcgcccgtctgtctcgaccggcccatctacccgtgccgctcgctgtgcgaggccgtgcgcgccggctgcgcgccgctcatggaggcctacggcttcccctggcctgagatgctgcactgccacaagttccccctggacaacgacctctgcatcgccgtgcagttcgggcacctgcccgccaccgcgcctccagtgaccaagatctgcgcccagtgtgagatggagcacagtgctgacggcctcatggagcagatgtgctccagtgactttgtggtcaaaatgcgcatcaaggagatcaagatagagaatggggaccggaagctgattggagcccagaaaaagaagaagctgctcaagccgggccccctgaagcgcaaggacaccaagcggctggtgctgcacatgaagaatggcgcgggctgcccctgcccacagctggacagcctggcgggcagcttcctggtcatgggccgcaaagtggatggacagctgctgctcatggccgtctaccgctgggacaagaagaataaggagatgaagtttgcagtcaaattcatgttctcctacccctgctccctctactaccctttcttctacggggcggcagagccccactgaagggcactcctccttgccctgccagctgtgccttgcttgccctctggccccgccccaacttccaggctgacccggccctactggagggtgttttcacgaatgttgttactggcacaaggcctaagggatgggcacggagcccaggctgtcctttttgacccaggggtcctggggtccctgggatgttgggcttcctctctcaggagcagggcttcttcatctgggtgaagacctcagggtctcagaaagtaggcaggggaggagagggtaagggaaaggtggaggggctcagggcaccctgaggcggaggtttcagagtagaaggtgatgtcagctccagctcccctctgtcggtggtggggcctcaccttgaagagggaagtctcaatattaggctaagctatttgggaaagttctccccaccgcccctgtacgcgtcatcctagccccccttaggaaaggagttagggtctcagtgcctccagccacaccccctgccttccccagcttgcccatttccctgccccaaggcccagagctccccccagactggagagcaagcccagcccagcctcggcatagacccccttctggtccgcccgtggctcgattcccgggattcattcctcagcctctgcttctcccttttatcccaataagttattgctactgctgtgaggccataggtactagacaaccaatacatgcagggttgggttttctaatttttttaactttttaattaaatcaaaggtcgacgcgcggccgcg

SEQ ID NO: 293 - DNA, 3076 bp, Homo sapiens
gtttctccagggaggcagggcccggggagaaagttggagcggtaacctaagctggcagtggcgtgatccggcaccaaatcggcccgcggtgcggtgcggagactccatgaggccctggacatgaacaagctgagtggaggcggcgggcgcaggactcgggtggaagggggccagcttgggggcgaggagtggacccgccacgggagctttgtcaataagcccacgcggggctggctgcatcccaacgacaaagtcatgggacccggggtttcctacttggttcggtacatgggttgtgtggaggtcctccagtcaatgcgtgccctggacttcaacacccggactcaggtcaccagggaggccatcagtctggtgtgtgaggctgtgccgggtgctaagggggcgacaaggaggagaaagccctgtagccgcccgctcagctctatcctggggaggagtaacctgaaatttgctggaatgccaatcactctcaccgtctccaccagcagcctcaacctcatggccgcagactgcaaacagatcatcgccaaccaccacatgcaatctatctcatttgcatccggcggggatccggacacagccgagtatgtcgcctatgttgccaaagaccctgtgaatcagagagcctgccacattctggagtgtcccgaagggcttgcccaggatgtcatcagcaccattggccaggccttcgagttgcgcttcaaacaatacctcaggaacccacccaaactggtcacccctcatgacaggatggctggctttgatggctcagcatgggatgaggaggaggaagagccacctgaccatcagtactataatgacttcccggggaaggaaccccccttggggggggtggtagacatgaggcttcgggaaggagccgctccaggggctgctcgacccactgcacccaatgcccagacccccagccacttgggagctacattgcctgtaggacagcctgttgggggagatccagaagtccgcaaacagatgccacctccaccaccctgtccagcaggcagagagctttttgatgatccctcctatgtcaacgtccagaacctagacaaggcccggcaagcagtgggtggtgctgggccccccaatcctgctatcaatggcagtgcaccccgggacctgtttgacatgaagcccttcgaagatgctcttcgcgtgcctccacctccccagtcggtgtccatggctgagcagctccgaggggagccctggttccatgggaagctgagccggcgggaggctgaggcactgctgcagctcaatggggacttcctggtacgggagagcacgaccacacctggccagtatgtgctcactggcttgcagagtgggcagcctaagcatttgctactggtggaccctgagggtgtggttcggactaaggatcaccgctttgaaagtgtcagtcaccttatcagctaccacatggacaatcacttgcccatcatctctgcgggcagcgaactgtgtctacagcaacctgtggagcggaaactgtgatctgccctagcgctctcttccagaagatgccctccaatcctttccaccctattccctaactctcgggacctcgtttgggagtgttctgtgggcttggccttgtgtcagagctgggagtagcatggactctgggtttcatatccagctgagtgagagggtttgagtcaaaagcctgggtgagaatcctgcctctccccaaacattaatcaccaaagtattaatgtacagagtggcccctcacctgggcctttcctgtgccaacctgatgccccttccccaagaaggtgagtgcttgtcatggaaaatgtcctgtggtgacaggcccagtggaacagtcacccttctgggcaagggggaacaaatcacacctctgggcttcagggtatcccagacccctctcaacacccgccccccccatgtttaaactttgtgcctttgaccatctcttaggtctaatgatattttatgcaaacagttcttggacccctgaattcaatgacagggatgccaacaccttcttggcttctgggacctgtgttcttgctgagcaccctctccggtttgggttgggataacagaggcaggagtggcagctgtcccctctccctggggatatgcaacccttagagattgccccagagccccactcccggccaggcgggagatggacccctcccttgctcagtgcctcctggccggggcccctcaccccaaggggtctgtatatacatttcataaggcctgccctcccatgttgcatgcctatgtactctacgccaaagtgcagcccttcctcctgaagcctctgccctgcctccctttctgggagggcggggtgggggtgactgaatttgggcctcttgtacagttaactctcccaggtggattttgtggaggtgagaaaaggggcattgagactataaagcagtagacaatccccacataccatctgtagagttggaactgcattcttttaaagttttatatgcatatattttagggctgtagacttactttcctattttcttttccattgcttattcttgagcacaaaatgataatcaattattacatttatacatcacctttttgacttttccaagcccttttacagctcttggcattttcctcgcctaggcctgtgaggtaactgggatcgcaccttttataccagagacctgaggcagatgaaatttatttccatctaggactagaaaaacttgggtctcttaccgcgagactgagaggcagaagtcagcccgaatgcctgtcagtttcatggaggggaaacgcaaaacctgcagttcctgagtaccttctacaggcccggcccagcctaggcccggggtggccacaccacagcaagccggccccccctcttttggccttgtggataagggagagttgaccgttttcatcctggcctccttttgctgtttggatgtttccacgggtctcacttataccaaagggaaaactcttcattaaagtccgtatttcttctaaaaaaaaaaaaaaaaaaaaaaaaaaa

SEQ ID NO: 294 - DNA, 2003 bp, Homo sapiens
gtcccgtcggtctcggcgccgggaagaggcggtggcgctgcccgcggtggcgggggttggcgacggagcgcgttggtgccaggaccggggtccgaggcgcgctctccgcccacagaaatgagccgtcagactgctacagcattacctaccggtacctcgaagtgtccaccatcccagagggtgcctgccctgactggcacaactgcatccaacaatgacttggcgagtctttttgagtgtccagtctgctttgactatgtgttaccgcccattcttcaatgtcagagtggccatcttgtttgtagcaactgtcgcccaaagctcacatgttgtccaacttgccggggccctttgggatccattcgcaacttggctatggagaaagtggctaattcagtacttttcccctgtaaatatgcgtcttctggatgtgaaataactctgccacacacagaaaaagcagaccatgaagagctctgtgagtttaggccttattcctgtccgtgccctggtgcttcctgtaaatggcaaggctctctggatgctgtaatgccccatctgatgcatcagcataagtccattacaaccctacagggagaggatatagtttttcttgctacagacattaatcttcctggtgctgttgactgggtgatgatgcagtcctgttttggctttcacttcatgttagtcttagagaaacaggaaaaatacgatggtcaccagcagttcttcgcaatcgtacagctgataggaacacgcaagcaagctgaaaattttgcttaccgacttgagctaaatggtcataggcgacgattgacttgggaagcgactcctcgatctattcatgaaggaattgcaacagccattatgaatagcgactgtctagtctttgacaccagcattgcacagctttttgcagaaaatggcaatttaggcatcaatgtaactatttccatgtgttgaaatggcaatcaaacattttctggccagtgtttaaaacttcagtttcacagaaaataaggcacccatctgtctgccaacctaaaactctttcggtaggtggaagctagacacatgaaggtaaataaaaagaaaggctgttaaatacaggaaacagttgcatgtagtaacactaatatatttaaaaataagtcaacagtaaaccactgaaaaaatatatgtatatacacccaagatgggcatcttttgtattaagaaaggaagcattgtaaaataattctgagttttgtgtttgttgtagattgattgtattgttgaaaaagtttgtttttgcgtgggagtgtgtgcctgcgtgggtgtgtgcgtgtttgggtttttttcctttaactgacaagccatcttgagtggtcatgggccactgcttttccctttgtgagtcaatacatagtgctgctgtgtgctttttttgtgtgtatttgctaatttttattaattttagtttttcattaaataaatttgacttttctgtaattcaggtttttcctttttttgtaccattttaaagttagtatcttttgatatgcatatttgtttatggtaaaaaatttataacgtgttcaatattttcttttcccccattaatcagttcattagaaatattttaaaatcagctattttgtgaagccatgagttccagaaagtaaaggtgacatcggaaaaataatcaaaagctatttaaagcatctataaggtgctctctttctgtcttctacagatgagtcacacctttgagcttaatctttgaaaggttagagaataaattgatttttataaatactgcaaatcaggcttttgtttcctttttcagatatcttggacaaatcacatattttaaaatttgttcttgtatttattggttttgcagaagaaggcatcgtcatgcacagtatttgtaattaaaagcaaatcatttgtttaaaaaggcagtttgcaaaaaatgtttttggtcttttataattctcattaaaagaatatctggc

SEQ ID NO: 295 - DNA, 1448 bp, Homo sapiens
tcgacgctgtagtggcttcgtcttcggtttttctcttccttcgctaacgcctcccggctctcgtcagcctcccgccggccgtctccttaacaccgaacaccatgccttcaattaagttgcagagttctgatggagagatatttgaagttgatgtggaaattgccaaacaatctgtgactattaagaccatgttggaagatttgggaatggatgatgaaggagatgatgacccagttcctctaccaaatgtgaatgcagcaatattaaaaaaggtcattcagtggtgcacccaccacaaggatgaccctcctcctcctgaagatgatgagaacaaagaaaagcgaacagatgatatccctgtttgggaccaagaattcctgaaagttgaccaaggaacactttttgaactcattctggctgcaaactacttagacatcaaaggtttgcttgatgttacatgcaagactgttgccaatatgatcaaggggaaaactcctgaggagattcgcaagaccttcaatatcaaaaatgactttactgaagaggaggaagcccaggtacgcaaagagaaccagtggtgtgaagagaagtgaaatgttgtgcctgacactgtaacactgtaaggattgttccaaatactagttgcactgctctgtttataattgttaatattagacaaacagtagacaaatgcagcagcaagtcaattgtattagcagaatattgtcctcattgcatgtgtagttgtagctcgagtcccaaaccttacggccaagtttcttctagtatgatggaaagtttcttttttctttgctctgaataaaactgaactgtgggttctctataagtggcattttgggctttcctcccttttttgtaaagcaatgtctgcctagtttattgtccaagttaactttaggtgaccttttaaaagttggcattgaaaataaaacaacttgcaaaaaagttttctggaatagaattaacaaaatattatctttatcatgagttggaaactggaaaaaggcttcttgaagtaaatgttctgagtggagctactaggatgtcttccagcctcctgcagtcaaggagtaccactgtattgattagcctgtatgtagcagggctcccttcattgcatctgaggacttgttttctttttctttatttttaatcctcttagttttaaatatattgcctagagactcagttactacccagtttgtggttttttgggagaaatgtaactggacagttagcttttcaattaaaaagacacttaacccatgtgggatgtcatctttttataattagtgttcccatgtggagaaaattattcacactacttgcatgtaaagaataatttaacttttaacattaaaatatgtggtaaaacccagaaagcatccatcatgaatgcaagatactttcaataaagtaagttatat

SEQ ID NO: 296 - DNA, 1997 bp, Homo sapiens
ggcacgagggattggtctgtgctcctctctcggctcctcgcggctcgcggcggccgacggttcctgggacacctgcttgcttggcccgtccggcggctcagggcttctctgctgcgctcccggttcgctggacgggaagaagggctgggccgtcccgtcccgtccccatcggaaccccaagtcgcgccgctgacccgtcgcagggcgagatgagcgcggacgcagcggccggggcgcccctgccccggctctgctgcctggagaagggtccgaacggctacggcttccacctgcacggggagaagggcaagttgggccagtacatccggctggtggagcccggctcgccggccgagaaggcggggctgctggcgggggaccggctggtggaggtgaacggcgaaaacgtggagaaggagacccaccagcaggtggtgagccgcatccgcgccgcactcaacgccgtgcgcctgctggtggtcgaccccgagacggacgagcagctgcagaagctcggcgtccaggtccgagaggagctgctgcgcgcccaggaagcgccggggcaggccgagccgccggccgccgccgaggtgcagggggctggcaacgaaaatgagcctcgcgaggccgacaagagccacccggagcagcgcgagcttcggcctcggctctgtaccatgaagaagggccccagtggctatggcttcaacctgcacagcgacaagtccaagccaggccagttcatccggtcagtggacccagactccccggctgaggcttcagggctccgggcccaggatcgcattgtggaggtgaacggggtctgcatggaggggaagcagcatggggacgtggtgtccgccatcagggctggcggggacgagaccaagctgctggtggtggacagggaaactgacgagttcttcaagaaatgcagagtgatcccatctcaggagcacctgaatggtcccctgcctgtgcccttcaccaatggggagatacagaaggagaacagtcgtgaagccctggcagaggcagccttggagagccccaggccagccctggtgagatccgcctccagtgacaccagcgaggagctgaattcccaagacagccccccaaaacaggactccacagcgccctcgtctacctcctcctccgaccccatcctagacttcaacatctccctggccatggccaaagagagggcccaccagaaacgcagcagcaaacgggccccgcagatggactggagcaagaaaaacgaactcttcagcaacctctgagcgccctgctgccacccagtgactggcagggccgagccagcattccaccccacctttttccttctccccaattactcccctgaatcaatgtacaaatcagcacccacatcccctttcttgacaaatgatttttctagagaactatgttcttccctgactttagggaaggtgaatgtgttcccgtcctcccgcagtcagaaaggagactctgcctccctcctcctcactgagtgcctcatcctaccgggtgtccctttgccaccctgcctgggacatcgctggaacctgcaccatgccaggatcatgggaccaggcgagagggcaccctcccttcctcccccatgtgataaatgggtccagggctgatcaaagaactctgactgcagaactgccgctctcagtggacagggcatctgttatcctgaaccttggcagacacgtcttgttttcatttgattttgttaagagtgcagtattgcagagtctagaggaatttttgtttccttgattaacatgattttcctggttgttaatccagggcatggcagtggcctcagccttaaacttttgttcctactcccaccctcagcgaactgggcagcacggggagggtttggctacccctgcccatccctgagccaggtaccaccattgtaaggaaacactttcagaaattcagctggttcctccaaaccaaaaaaaaaaaaaaaa

SEQ ID NO: 297 - DNA, 10531 bp, Homo sapiens
gggaggcggggcgggccgtaggcaaagggaggtggggaggcggtggccggcgactccccgcgccccgctcgccccccggcccttcccgcggtgctcggcctcgttcctttcctcctccgctccctccgtcttccatacccgccccgcgcggctttcggccggcgtgcctcgcgccctaacgggcggctggaggcgccaatcagcgggcggcagggtgccagccccggggctgcgccggcgaatcggcggggcccgcggcccagggtggcaggcgggtctacccgcgcggccgcggcggcggagaagcagctcgccagccagcagcccgccagccgccgggaggttcgatacaagaggctgttttcctagcgtggcttgctgcctttggtaagaacatgtcgtccatcttgccattcacgccgccagttgtgaagagactgctgggatggaagaagtcagctggtgggtctggaggagcaggcggaggagagcagaatgggcaggaagaaaagtggtgtgagaaagcagtgaaaagtctggtgaagaagctaaagaaaacaggacgattagatgagcttgagaaagccatcaccactcaaaactgtaatactaaatgtgttaccataccaagcacttgctctgaaatttggggactgagtacaccaaatacgatagatcagtgggatacaacaggcctttacagcttctctgaacaaaccaggtctcttgatggtcgtctccaggtatcccatcgaaaaggattgccacatgttatatattgccgattatggcgctggcctgatcttcacagtcatcatgaactcaaggcaattgaaaactgcgaatatgcttttaatcttaaaaaggatgaagtatgtgtaaacccttaccactatcagagagttgagacaccagttttgcctccagtattagtgccccgacacaccgagatcctaacagaacttccgcctctggatgactatactcactccattccagaaaacactaacttcccagcaggaattgagccacagagtaattatattccagaaacgccacctcctggatatatcagtgaagatggagaaacaagtgaccaacagttgaatcaaagtatggacacaggctctccagcagaactatctcctactactctttcccctgttaatcatagcttggatttacagccagttacttactcagaacctgcattttggtgttcgatagcatattatgaattaaatcagagggttggagaaaccttccatgcatcacagccctcactcactgtagatggctttacagacccatcaaattcagagaggttctgcttaggtttactctccaatgttaaccgaaatgccacggtagaaatgacaagaaggcatataggaagaggagtgcgcttatactacataggtggggaagtttttgctgagtgcctaagtgatagtgcaatctttgtgcagagccccaattgtaatcagagatatggctggcaccctgcaacagtgtgtaaaattccaccaggctgtaatctgaagatcttcaacaaccaggaatttgctgctcttctggctcagtctgttaatcagggttttgaagccgtctatcagctaactagaatgtgcaccataagaatgagttttgtgaaagggtggggagcagaataccgaaggcagacggtaacaagtactccttgctggattgaacttcatctgaatggacctctacagtggttggacaaagtattaactcagatgggatccccttcagtgcgttgctcaagcatgtcataaagcttcaccaatcaagtcccatgaaaagacttaatgtaacaactcttctgtcatagcattgtgtgtggtccctatggactgtttactatccaaaagttcaagagagaaaacagcacttgaggtctcatcaattaaagcaccttgtggaatctgtttcctatatttgaatattagatgggaaaattagtgtctagaaatactctcccattaaagaggaagagaagattttaaagacttaatgatgtcttattgggcataaaactgagtgtcccaaaggtttattaataacagtagtagttatgtgtacaggtaatgtatcatgatccagtatcacagtattgtgctgtttatatacatttttagtttgcatagatgaggtgtgtgtgtgcgctgcttcttgatctaggcaaacctttataaagttgcagtacctaatctgttattcccacttctctgttatttttgtgtgtcttttttaatatataatatatatcaagattttcaaattatttagaagcagattttcctgtagaaaaactaatttttctgccttttaccaaaaataaactcttgggggaagaaaagtggattaacttttgaaatccttgaccttaatgtgttcagtggggcttaaacagtcattctttttgtggttttttgtttttttttgtttttttttttaactgctaaatcttattataaggaaaccatactgaaaacctttccaagcctcttttttccattcccatttttgtcctcataatcaaaacagcataacatgacatcatcaccagtaatagttgcattgatactgctggcaccagttaattctgggatacagtaagaattcatatggagaaagtccctttgtcttatgcccaaatttcaacaggaataattggcttgtataatctagcagtctgttgatttatccttccacctcataaaaaatgcataggtggcagtataattattttcagggatatgctagaattacttccacatatttatccctttttaaaaaagctaatctataaataccgtttttccaaaggtattttacaatatttcaacagcagaccttctgctcttcgagtagtttgatttggtttagtaaccagattgcattatgaaatgggccttttgtaaatgtaattgtttctgcaaaatacctagaaaagtgatgctgaggtaggatcagcagatatgggccatctgtttttaaagtatgttgtattcagtttataaattgattgttattctacacataattatgaattcagaattttaaaaattgggggaaaagccatttatttagcaagttttttagcttataagttacctgcagtctgagctgttcttaactgatcctggttttgtgattgacaatatttcatgctctgtagtgagaggagatttccgaaactctgttgctagttcattctgcagcaaataattattatgtctgatgttgactcattgcagtttaaacatttcttcttgtttgcatcttagtagaaatggaaaataaccactcctggtcgtcttttcataaattttcatatttttgaagctgtctttggtacttgttctttgaaatcatatccacctgtctctataggtatcattttcaatactttcaacatttggtggttttctattgggtactccccattttcctatatttgtgtgtatatgtatgtgttcatgtaaatttggtatagtaattttttattcattcaacaaatatttattgttcacctgtttgtaccaggaacttttcttagtctttgggtaaaggtgaacaagacaactacagttcctgcctttgctgagacagcagttacactaacccttaattatcttacttgtctatgaaggagataaacagggtactgtactggagaataacagatgggatgcttcaggtaggacatcaaggaaagcctctaaggaaaggatgcatgagctaacacctgacattaaagaagcaagccaagtgaggagccaggggagataagcattcctggcaaagagaatagcatcaaatgcaaaaaggttcacactaaaggaaactcctgattaggtattaatgctttatacagaaacctctatacaaatccaaacttgaagatcagaatggttctacagttcataacattttgaaggtggccttattttgtgatagtctgcttcatgtgattctcactaacatatctccttcctcaacctttgctgtaaaaatttcatttgcaccacatcagtactacttaatttaacaagcttttgttgtgtaagctctcactgttttagtgccctgctgcttgcttccagactttgtgctgtccagtaattatgtcttccactacccatcttgtgagcagagtaaatgtcctaggtaataccactatcaggcctgtaggagatactcagtggagcctctgcccttctttttcttacttgagaacttgtaatggtgttagggaacagttgtaggggcagaaaacaactctgaaagtggtagaaggtcctgatcttggtggttactcttgcattactgtgttaggtcaagcagtgcctactatgctgtttcagtagtggagcgcatctctacagttctgatgcgatttttctgtacagtatgaaattgggactcaactctttgaaaacacctattgagcagttatacctgttgagcagtttacttcctggttgtaattacatttgtgtgaatgtgtttgatgctttttaacgagatgatgttttttgtattttatctactgtggcctgattttttttttgttttctgcccctccccccatttataggtgtggttttcatttttctaagtgatagaatcccctctttgttgaatttttgtctttatttaaattagcaacattacttaggatttattcttcacaatactgttaattttctaggaatgatgacctgagaaccgaatggccatgctttctatcacatttctaagatgagtaatattttttccagtaggttccacagagacaccttgggggctggcttaggggaggctgttggagttctcactgacttagtggcatatttattctgtactgaagaactgcatggggtttcttttggaaagagtttcattgctttaaaaagaagctcagaaagtctttataaccactggtcaacgattagaaaaatataactggatttaggcctaccttctggaataccgctgattgtgctctttttatcctactttaaagaagctttcatgattagatttgagctatatcagttataccgattataccttataatacacattcagttagtaaacatttattgatgcctgttgtttgcccagccactgtgatggatattgaataataaaaagatgactaggacggggccctgacccttgagctgtgcttggtcttgtagaggttgtgttttttttcctcaggacctgtcactttggcagaaggaaatctgcctaatttttcttgaaagctaaattttctttgtaagtttttacaaattgtttaatacctagttgtattttttaccttaagccacattgagttttgcttgatttgtctgtcttttaaacactgtcaaatgctttcccttttgttaaaattattttaatttcactttttttgtgcccttgtcaatttaagactaagactttgaaggtaaaacaaacaaacaaacatcagtcttagtctcttgctagttgaaatcaaataaaagaaaatatatacccagttggtttctctacctcttaaaagcttcccatatatacctttaagatccttctcttttttctttaactactaaataggttcagcatttattcagtgttagataccctcttcgtctgagggtggcgtaggtttatgttgggatataaagtaacacaagacaatcttcactgtacataaaatatgtcttcatgtacagtctttactttaaaagctgaacattccaatttgcgccttccctcccaagcccctgcccaccaagtatctctttagatatctagtctgtggacatgaacaatgaatacttttttcttactctgatcgaaggcattgatacttagacatatcaaacatttcttcctttcatatgctttactttgctaaatctattatattcattgcctgaattttattcttcctttctacctgacaacacacatccaggtggtacttgctggttatcctctttcttgttagccttgttttttgttttttttttttttttttgagagggagtctcgctctgttgcccaacctggagtgcagtggtgcgatcttggttcactgcaagctccgcctcccgggttcacgccatgcttctgcctcagcctcccaagtagctgggactacaggcgcccaccaccacactcggctaattttttgtatttttagtagagacggggtttcaccgtgttggccaggatggtctcgatctcctgacctcgtgatctgtccacctcggcttcccaaagtgctgggattacaggcatgagccaccgcgcccagcctagccatatttttatctgcatatatcagaatgtttctctcctttgaacttattaacaaaaaaggaacatgcttttcatacctagagtcctaatttcttcatcatgaaggttgctattcaaattgatcaatcattttaattttacaaatggctcaaaaattctgttcagtaaatgtctttgtgactggcaaatggcataaattatgtttaagattatgaacttttctgacagttgcagccaatgttttccctacgataccagatttccatcttggggcatattggattgttgtatttaagacagtcagaataatgatagtgtgtggtctccagaggtagtcagaatcctgctattgagttctttttatatcttccttttcaattttttattaccattttgtttgtttagactacactttgtagggattgaggggcaaattatctcttggagtggaattcctgtgttttgagccttacaaccaggaaatatgagctatactagatagcctcatgatagcatttacgataagaacttatctcgtgtgttcatgtaattttttgagtaggaactgttttatcttgaatattgtagctaactatatatagcagaactgcctcagtctttttaagaaggaaataaataatatatgtgtatgaatttatatatacatatacactcatagacaaacttaacagttggggtcattctaacagttaaaacaattgttccattgtttaaatctcagatcctggtaaaatgttcttaatttgtctgtgtacattttcctttcatggacagaccattggagtacattaattttcttaatctgccatttggcagttcatttaatataccattttttggcaacttggtaactaagaatcacagccaaaatttgttaacatcaaagaaagctctgccatataccccgttactaaattattatacatccagcagattctgggatgtactaacttagggttaactttgttgttgttgataatactagattgctccctctttaattcttcttctggtgcaaggttgctgcttaagttaccctgggaaatactactacaaggtcaaattttctagtatcttacagcctgattgaaggtgattcagatctttgctcaatataaatggattttccaagattctctgggccatccttgacccacaggtgatctcgctggagtatattaacttaacttcagtgccagttggtttggtgccatgagatccataatgaatccagaacttcaccattgcttagatataagagtcccttggaagaataatgccactgatgatgggggtcagaaggtgtattaactcaacatagagggcttttagatttttcttcaaaaaaatttcgagaaaagtattcttttaccctccaaacagttaacagctcttagtttctccaaatatgctctttgatttacttatttttaattaaagatggtaatttattgaacaatgaaatccgtaatatattgatttaaggacaaaagtgaagttttagaattataaaagtacttaaatattatatattttccatttcataattgttttcctttctctgtggctttaaagtttttgactattttacaatgttaatcactaggtaacttgccatatttctggttctatattaagttctatcctttataatgctgttattataaagctggtttttagcatttgtctgtagcaatagaaattttactaagtctctgttctcccagtaagttttttcttttctcagtaagtccctaagaaaacatttgtttgccactcttactattcccaatcttggattgttcgagctgaaaaaaaatttgatgagaaacaggaggatccttttctggtgaatataggttcctgctttaagaatgtggaaatccattgctttatataactaatatacacacagattaattaaaattgtgagaaataattcacacatgacaagtaggtaacatgcatgagttttgaatttttttaaaaacccaactgtttgacaaaatatagaacccaaattggtactttcttagaccagtgtaacctcacacctcagttttgcttttccaaccctgacttgaaaggcatatttgtatctttttattagtgatagtgaagctgtgacactaaccttttatacaaaagagtaaagaaagaaaaactacagcgattaagatgagaacagttctgcagttgttgaactagatcacagcattgtaggcagaataaaaaatgttcatatctgagaatattcctttcgccatcttttcccaaggccagacctcctggtggagcacagttaaaagtaacattctgggcctttgtaatcggagggctgtgtctccagctggcagcctttgttttaatatataatgcaggactgtggaaaacagttggcatagaatattttcacctaaaaaagaaagaaaagacatacaaaactggattaattgcaaaaagagaatacagtaaaataccatataactggacaaagctagaagaacctttagaagatttgtctgaaaacagatttcaagagtgagcttttatacactgctcactaatttgcttgattactaccaactcttcttaaagttaacacgtttaaggtatttctggacttcctagccttttagcaagcttagaggaactagccattagctagtgatgtaaaaatattttggggactgatgcccttaaaggttatgcccttgaaagttcttaccttttctctagtgatattaaggaacgagtgggtagtgttctcagggtgaccagctgccctaaagtgcctgggattgagggtttccctggatgcgggactttccctggatacaaaacttttagcagagttttgtatatatgtggatttttctgataagtagcacatcagaggccttaaccactgcccaaaagcgattctccattgagagtacatatcttgaacttaagaaattcatttgctctgatttttaatcttgtaaagtttttgctaaactcaaaacaagtcccaggcacaccagaaggagctgaccaccttaggtgttcttgtgatttatccttacttccctatgttgtcatagttgcttctaaactcagctgcactatggctgtcaacatttctgatacttattgggatatgtgccatccagtcatttagtactttgaatggaacatgagatttataacacaggtaatagctgaaggtaccagtatggtggtgagactcacacttagtgatccagctaaggtaactgatgttataatggaacagagaagaggccaactagatagctaagttcttctgaacctatgtgtatatgtaagtacaaatcatgcgtccttatggggttaaacttaatctgaaatttacatttttcatagtaaaaggaaaccaattgttgcagatttcttttcttgtgaggaaatacatggcctttgatgctctggcgtctactgcatttcccagtctgttctgctcgagaagccagaatgtgttgttaacatttttccgtgaatgttgtgttaaaatgattaaatgcatcagccaatggcaagtgaaggaattgggtgtcctgatgcagactgagcagtttctctcaattgtagcctcatactcataaggtgcttaccagctagaacattgagcacgtgaggtgagattttttttctctgatggcattaactttgtaatgcaatatgatggatgcagaccctgttcttgtttccctctggaagtccttagtggctgcatccttggtgcactgtgatggagatattaaatgtgttctttgtgagctttcgttctatgattgtcaaaagtacgatgtggttccttttttatttttattaaacaatgagctgaggctttattacagctggttttcaagttaaaattgttgaatactgatgtctttctcccacctacaccaaatattttagtctatttaaagtacaaaaaaagttctgcttaagaaaacattgcttacatgtcctgtgatttctggtcaatttttatatatatttgtgtgcatcatctgtatgtgctttcactttttaccttgtttgctcttacctgtgttaacagccctgtcaccgttgaaaggtggacagttttcctagcattaaaagaaagccatttgagttgtttaccatgtta

SEQ ID NO: 298 - DNA, 6256 bp, Homo sapiens
gcggccgccgcctccgccccgcgttcggggccttcccgaccctgcactgctgccgtccgcccgcccggccgctcttctcttcgccgtgggagccgctccgggcgcagggccgcgcgccgagccccgcaggctgcagcgccgcggcccggcccggcgccccggcaacttcgccgagagttgaggcgaagtttgggcgaccgcggcaggccccggccgagctcccctctgcgcccccggcgtcccgtcgagcccagccccgccgggggcgctcctcgccgcccgcgcgccctccccagccatgtcgtccatcctgcctttcactcccccgatcgtgaagcgcctgctgggctggaagaagggcgagcagaacgggcaggaggagaaatggtgcgagaaggcggtcaagagcctggtcaagaaactcaagaagacggggcagctggacgagctggagaaggccatcaccacgcagaacgtcaacaccaagtgcatcaccatccccaggtccctggatggccggttgcaggtgtcccatcggaaggggctccctcatgtcatctactgccgcctgtggcgatggccagacctgcacagccaccacgagctacgggccatggagctgtgtgagttcgccttcaatatgaagaaggacgaggtctgcgtgaatccctaccactaccagagagtagagacaccagttctacctcctgtgttggtgccacgccacacagagatcccggccgagttccccccactggacgactacagccattccatccccgaaaacactaacttccccgcaggcatcgagccccagagcaatattccagagaccccaccccctggctacctgagtgaagatggagaaaccagtgaccaccagatgaaccacagcatggacgcaggttctccaaacctatccccgaatccgatgtccccagcacataataacttggacctgcagccagttacctactgcgagccggccttctggtgctccatctcctactacgagctgaaccagcgcgtcggggagacattccacgcctcgcagccatccatgactgtggatggcttcaccgacccctccaattcggagcgcttctgcctagggctgctctccaatgtcaacaggaatgcagcagtggagctgacacggagacacatcggaagaggcgtgcggctctactacatcggaggggaggtcttcgcagagtgcctcagtgacagcgctatttttgtccagtctcccaactgtaaccagcgctatggctggcacccggccaccgtctgcaagatcccaccaggatgcaacctgaagatcttcaacaaccaggagttcgctgccctcctggcccagtcggtcaaccagggctttgaggctgtctaccagttgacccgaatgtgcaccatccgcatgagcttcgtcaaaggctggggagcggagtacaggagacagactgtgaccagtaccccctgctggattgagctgcacctgaatgggcctttgcagtggcttgacaaggtcctcacccagatgggctccccaagcatccgctgttccagtgtgtcttagagacatcaagtatggtaggggagggcaggcttggggaaaatggccatgcaggaggtggagaaaattggaactctactcaacccattgttgtcaaggaagaagaaatctttctccctcaactgaaggggtgcacccacctgttttctgaaacacacgagcaaacccagaggtggatgttatgaacagctgtgtctgccaaacacatttaccctttggccccactttgaagggcaagaaatggcgtctgctctggtggcttaagtgagcagaacaggtagtattacaccaccggccccctccccccagactctttttttgagtgacagctttctgggatgtcacagtccaaccagaaacacccctctgtctaggactgcagtgtggagttcaccttggaagggcgttctaggtaggaagagcccgcagggccatgcagacctcatgcccagctctctgacgcttgtgacagtgcctcttccagtgaacattcccagcccagccccgccccgccccgccccaccactccagcagaccttgccccttgtgagctggatagacttgggatggggagggagggagttttgtctgtctccctcccctctcagaacatactgattgggaggtgcgtgttcagcagaacctgcacacaggacagcgggaaaaatcgatgagcgccacctctttaaaaactcacttacgtttgtcctttttcactttgaaaagttggaaggatctgctgaggcccagtgcatatgcaatgtatagtgtctattatcacattaatctcaaagagattcgaatgacggtaagtgttctcatgaagcaggaggcccttgtcgtgggatggcatttggtctcaggcagcaccacactgggtgcgtctccagtcatctgtaagagcttgctccagattctgatgcatacggctatattggtttatgtagtcagttgcattcattaaatcaactttatcatatgctcttttaaatgtttggtttatatattttctttaaaaatcctgggctggcacattgactgggaaacctgagtgagacccagcaactgcttctctcccttctctctcctgaggtgaagcttttccaggttttgttgaagagatacctgccagcacttctgcaagctgaaatttacagaagcaaattcaccagaagggaaacatctcaggccaacataggcaaatgaaaagggctattaaaatatttttacacctttgaaaattgcaggcttggtacaaagaggtctgtcatcttccccctgggatataagatgatctagctcccggtagaggatcaccggtgacaactatagcagttgtattgtgtaacaagtactgctcccagcagcaattagggagaaaactagtctaaattatttcaactggaaaaaagaaaaaagagtcctcttcttttcccagccttttgcagaacacagtagacagaactgccaccttcaattggtactttattctttgctgctgtttttgtataaaatgacctatcccacgtttttgcatgaatttatagcaggaaaaatcaagggatttcctatggaagtcctgctttattccaggtgaagggaaggaagtgtatatacttttggcaagtcatacagctcaaatgtgatgagatttctgatgttagagggagatggagaggcttcctgatgcctcatctgcagggtcctgtgcctctgaagttctagccatgaggtttccaggtaggacagctgctccccaagcctcctgaggacacaggaagagacggaaggagcaccttgacagacttgtgtgagtcttctcgaaggagggttgactcagaacccagagacaatacaaaacccctcacttcctctgagagggccaaatgctgtgagtctgaagtatgtgcctggtgtgaaatgatctatggcctgtttcttacacaggaagccccctgaacctcctgtacatgtgttcatgttcccagccagctctgagacccaggaaccaaatattccattttggcttctgctagagcagtcatggttcctctcctaaaagccatgggcagcagtttccgagggcctgcatgatccacctgctgcacgatcctatgagggcttcctgtggcacacagccctctgggtgcttgggaactagcttcaggcacagcctgattctggtgatccagtgatctatggaagtcgtgtcttactccaggtgaagggggaaaaaaaaagcctatactttggcaggttatgaactttgaatgtgatgaaatgacacgtttggctgcatttggatggtgtcttagaaccctcattgctcagacctgaaggctacttctaggagcatgaagtttgagttttgtgtttttccaaaggatacttccttggccctttttctttattgactagaccaccagaggaggatgtgtgggattgtaggcaaacccacctgtggcatcactgaaaataaatttgatcatacctaagaggttaggaaatggtgccattcccaccttagagtgctacataggtgctttgggcgtatgtaacattagtgtccttccttgaagccacaagctagttttcttagttttaaaatcctgttgtatgaatggcatttgtatattaaaacacttttttaaaggacagttgaaaagggcaagaggaaaccagggcagttctagaggagtgctggtgactggatagcagttttaagtggcgttcacctagtcaacacgaccgcgtgtgttgcccctgccctgggctccccgccatgacatcttcaccttgcagcttgtgctgagactgacccaagtgcagctagcactgggacacagatccttgtcttcagcaccttccaaggagccaacttttattccctttcctctctcccctccccacctcgcttcttcccaatttagtaacttagatgcttccagcacatacgtaggtagctaccccagccggtttggattacaggcctgtgctggaacatcatctcagttggccaccttcctggcaggctgtagacctgacattttgagacaagcctagagtcaggagcagggactttgactcttaggaagagcacacatgagggcaaggctgctggcagacgtctccattgtccttatgttgtctgtgttgtatttttttttttttattgaccatggtgattatttttttaaaccatcgttaatatactgaagtgagctatagcacatatcatgtgcttagtttgtttatttttctccatctccccttggcttcctagagtttggacatattccaggctaaatgcttttactcaagactacagaaaggtttgaagtagtgtgtgcatggcatgcacgtatgtaagtaatctggggaagaagcaaagatctgtttcattcttagcctcaggcctcatgagggtctccacagggccggagctcaggttacaccactccttcgtccttacaggagatgtagggagaagaatctgcaggctgcttgtaggactgttcaccaagggggataccagcagcaagagagtgcacccgtttagccctggaccctgtttcttactgtgtgacttggctagagttgggagttcccccaaaataaacgtgtccccattttaccagaaccaaacctcaacacagcgaagctgtactgtctttgtgtggcaaagatgttcccttgtaggcccctttcaggtaaccgtcttcacaatgtattttcatcacagtttaaggagcatcagccgcttctcaagtgggtagggaaagcagaaaaacgtacgcaagaggacatggatccaaaatgatgatgaagcatctcccatggggaggtgatggtggggagatgatgggctaaacaggcaacttttcaaaaacacagctatcatagaaaagaaacttgcctcatgtaaactggattgagaaattctcagtgattctgcaatggatttttttttaatgcagaagtaatgtatactctagtattctggtgtttttatatttatgtaataatttcttaaaaccattcagacagataactatttaattttttttaagaaagttggaaaggtctctcctcccaaggacagtggctggaagagttggggcacagccagttctgaatgttggtggagggtgtagtggctttttggctcagcatccagaaacaccaaaccaggctggctaaacaagtggccgcgtgtaaaaacagacagctctgagtcaaatctgggcccttccacaagggtcctctgaaccaagccccactcccttgctaggggtgaaagcattacagagagatggagccatctatccaagaagccttcactcaccttcactgctgctgttgcaactcggctgttctggactctgatgtgtgtggagggatggggaatagaacattgactgtgttgattaccttcactattcggccagcctgaccttttaataactttgtaaaaagcatgtatgtatttatagtgttttagatttttctaacttttatatcttaaaagcagagcacctgtttaagcattgtacccctattgttaaagatttgtgtcctctcattccctctcttcctcttgtaagtgcccttctaataaacttttcatggaaaagctcctgtgccaggagctcagtctgaaaaaaaaaaaaaaaaaaaaaaaaa

SEQ ID NO: 299 - DNA, 3220 bp, Homo sapiens
caacaacacggccctggtcgtcgtcgccgctgcggtaacggagcggtttgggtggcggagcctgcgttcgcgccttcccactcccctcgccaccgcccgagcccaggttatcctgaatacatgtctaacaattttccttgcaacgttagctgttgtttttcactgtttccaaaggatcaaaattgcttcagaaattggagacatatttgatttaaaaggaaaaacttgaacaaatggacaatatgtctattacgaatacaccaacaagtaatgatgcctgtctgagcattgtgcatagtttgatgtgccatagacaaggtggagagagtgaaacatttgcaaaaagagcaattgaaagtttggtaaagaagctgaaggagaaaaaagatgaattggattctttaataacagctataactacaaatggagctcatcctagtaaatgtgttaccatacagagaacattggatgggaggcttcaggtggctggtcggaaaggatttcctcatgtgatctatgcccgtctctggaggtggcctgatcttcacaaaaatgaactaaaacatgttaaatattgtcagtatgcgtttgacttaaaatgtgatagtgtctgtgtgaatccatatcactacgaacgagttgtatcacctggaattgatctctcaggattaacactgcagagtaatgctccatcaagtatgatggtgaaggatgaatatgtgcatgactttgagggacagccatcgttgtccactgaaggacattcaattcaaaccatccagcatccaccaagtaatcgtgcatcgacagagacatacagcaccccagctctgttagccccatctgagtctaatgctaccagcactgccaactttcccaacattcctgtggcttccacaagtcagcctgccagtatactggggggcagccatagtgaaggactgttgcagatagcatcagggcctcagccaggacagcagcagaatggatttactggtcagccagctacttaccatcataacagcactaccacctggactggaagtaggactgcaccatacacacctaatttgcctcaccaccaaaacggccatcttcagcaccacccgcctatgccgccccatcccggacattactggcctgttcacaatgagcttgcattccagcctcccatttccaatcatcctgctcctgagtattggtgttccattgcttactttgaaatggatgttcaggtaggagagacatttaaggttccttcaagctgccctattgttactgttgatggatacgtggacccttctggaggagatcgcttttgtttgggtcaactctccaatgtccacaggacagaagccattgagagagcaaggttgcacataggcaaaggtgtgcagttggaatgtaaaggtgaaggtgatgtttgggtcaggtgccttagtgaccacgcggtctttgtacagagttactacttagacagagaagctgggcgtgcacctggagatgctgttcataagatctacccaagtgcatatataaaggtctttgatttgcgtcagtgtcatcgacagatgcagcagcaggcggctactgcacaagctgcagcagctgcccaggcagcagccgtggcaggaaacatccctggcccaggatcagtaggtggaatagctccagctatcagtctgtcagctgctgctggaattggtgttgatgaccttcgtcgcttatgcatactcaggatgagttttgtgaaaggctggggaccggattacccaagacagagcatcaaagaaacaccttgctggattgaaattcacttacaccgggccctccagctcctagacgaagtacttcataccatgccgattgcagacccacaacctttagactgaggtcttttaccgttggggcccttaaccttatcaggatggtggactacaaaatacaatcctgtttataatctgaagatatatttcacttttgttctgctttatcttttcataaagggttgaaaatgtgtttgctgccttgctcctagcagacagaaactggattaaaacaattttttttttcctcttcagaacttgtcaggcatggctcagagcttgaagattaggagaaacacattcttattaattcttcacctgttatgtatgaaggaatcattccagtgctagaaaatttagccctttaaaacgtcttagagccttttatctgcagaacatcgatatgtatatcattctacagaataatccagtattgctgattttaaaggcagagaagttctcaaagttaattcacctatgttattttgtgtacaagttgttattgttgaacatacttcaaaaataatgtgccatgtgggtgagttaattttaccaagagtaactttactctgtgtttaaaaagtaagttaataatgtattgtaatctttcatccaaaatattttttgcaagttatattagtgaagatggtttcaattcagattgtcttgcaacttcagttttatttttgccaaggcaaaaaactcttaatctgtgtgtatattgagaatcccttaaaattaccagacaaaaaaatttaaaattacgtttgttattcctagtggatgactgttgatgaagtatacttttcccctgttaaacagtagttgtattcttctgtatttctaggcacaaggttggttgctaagaagcctataagaggaatttcttttccttcattcatagggaaaggttttgtattttttaaaacactaaaagcagcgtcactctacctaatgtctcactgttctgcaaaggtggcaatgcttaaactaaataatgaataaactgaatattttggaaactgctaaattctatgttaaatactgtgcagaataatggaaacattacagttcataataggtagtttggatatttttgtacttgatttgatgtgactttttttggtataatgtttaaatcatgtatgttatgatattgtttaaaattcagtttttgtatcttggggcaagactgcaaacttttttatatcttttggttattctaagccctttgccatcaatgatcatatcaattggcagtgactttgtatagagaatttaagtagaaaagttgcagatgtattgactgtaccacagacacaatatgtatgctttttacctagctggtagcataaataaaactgaatctcaacataaaaaaaaaaaaaaaaaaa

SEQ ID NO: 300 - DNA, 5681 bp, Homo sapiens
cgccgcggtgctgagggggaggggagccggcgagcgcgcgcgcagcgggggcgcgggtggcgcgcgtgtgtgtgaagggggggcggtggccgaggcgggcgggcgcgcgcgcgaggcttcccctcgtttggcggcggcggcggcttctttgtttcgtgaagagaagcgagacgcccattctgcccccggccccgcgcggaggggcgggggaggcgccgggaagtcgacggcgccggcggctcctgcaggaggccactgtctgcagctcccgtgaagatgtccactccagacccacccctgggcggaactcctcggccaggtccttccccgggccctggcccttcccctggagccatgctgggccctagcccgggtccctcgccgggctccgcccacagcatgatggggcccagcccagggccgccctcagcaggacaccccatccccacccaggggcctggagggtaccctcaggacaacatgcaccagatgcacaagcccatggagtccatgcatgagaagggcatgtcggacgacccgcgctacaaccagatgaaaggaatggggatgcggtcagggggccatgctgggatggggcccccgcccagccccatggaccagcactcccaaggttacccctcgcccctgggtggctctgagcatgcctctagtccagttccagccagtggcccgtcttcggggccccagatgtcttccgggccaggaggtgccccgctggatggtgctgacccccaggccttggggcagcagaaccggggcccaaccccatttaaccagaaccagctgcaccagctcagagctcagatcatggcctacaagatgctggccagggggcagcccctccccgaccacctgcagatggcggtgcagggcaagcggccgatgcccgggatgcagcagcagatgccaacgctacctccaccctcggtgtccgcaacaggacccggccctggccctggccctggccccggcccgggtcccggcccggcacctccaaattacagcaggcctcatggtatgggagggcccaacatgcctcccccaggaccctcgggcgtgccccccgggatgccaggccagcctcctggagggcctcccaagccctggcctgaaggacccatggcgaatgctgctgcccccacgagcacccctcagaagctgattcccccgcagccaacgggccgcccttcccccgcgccccctgccgtcccacccgccgcctcgcccgtgatgccaccgcagacccagtcccccgggcagccggcccagcccgcgcccatggtgccactgcaccagaagcagagccgcatcacccccatccagaagccgcggggcctcgaccctgtggagatcctgcaggagcgcgagtacaggctgcaggctcgcatcgcacaccgaattcaggaacttgaaaaccttcccgggtccctggccggggatttgcgaaccaaagcgaccattgagctcaaggccctcaggctgctgaacttccagaggcagctgcgccaggaggtggtggtgtgcatgcggagggacacagcgctggagacagccctcaatgctaaggcctacaagcgcagcaagcgccagtccctgcgcgaggcccgcatcactgagaagctggagaagcagcagaagatcgagcaggagcgcaagcgccggcagaagcaccaggaatacctcaatagcattctccagcatgccaaggatttcaaggaatatcacagatccgtcacaggcaaaatccagaagctgaccaaggcagtggccacgtaccatgccaacacggagcgggagcagaagaaagagaacgagcggatcgagaaggagcgcatgcggaggctcatggctgaagatgaggaggggtaccgcaagctcatcgaccagaagaaggacaagcgcctggcctacctcttgcagcagacagacgagtacgtggctaacctcacggagctggtgcggcagcacaaggctgcccaggtcgccaaggagaaaaagaagaaaaagaaaaagaagaaggcagaaaatgcagaaggacagacgcctgccattgggccggatggcgagcctctggacgagaccagccagatgagcgacctcccggtgaaggtgatccacgtggagagtgggaagatcctcacaggcacagatgcccccaaagccgggcagctggaggcctggctcgagatgaacccggggtatgaagtagctccgaggtctgatagtgaagaaagtggctcagaagaagaggaagaggaggaggaggaagagcagccgcaggcagcacagcctcccaccctgcccgtggaggagaagaagaagattccagatccagacagcgatgacgtctctgaggtggacgcgcggcacatcattgagaatgccaagcaagatgtcgatgatgaatatggcgtgtcccaggcccttgcacgtggcctgcagtcctactatgccgtggcccatgctgtcactgagagagtggacaagcagtcagcgcttatggtcaatggtgtcctcaaacagtaccagatcaaaggtttggagtggctggtgtccctgtacaacaacaacctgaacggcatcctggccgacgagatgggcctggggaagaccatccagaccatcgcgctcatcacgtacctcatggagcacaaacgcatcaatgggcccttcctcatcatcgtgcctctctcaacgctgtccaactgggcgtacgagtttgacaagtgggccccctccgtggtgaaggtgtcttacaagggatccccagcagcaagacgggcctttgtcccccagctccggagtgggaagttcaacgtcttgctgacgacgtacgagtacatcatcaaagacaagcacatcctcgccaagatccgttggaagtacatgattgtggacgaaggtcaccgcatgaagaaccaccactgcaagctgacgcaggtgctcaacacgcactatgtggcaccccgccgcctgctgctgacgggcacaccgctgcagaacaagcttcccgagctctgggcgctgctcaacttcctgctgcccaccatcttcaagagctgcagcaccttcgagcagtggtttaacgcaccctttgccatgaccggggaaaaggtggacctgaatgaggaggaaaccattctcatcatccggcgtctccacaaagtgctgcggcccttcttgctccgacgactcaagaaggaagtcgaggcccagttgcccgaaaaggtggagtacgtcatcaagtgcgacatgtctgcgctgcagcgagtgctctaccgccacatgcaggccaagggcgtgctgctgactgatggctccgagaaggacaagaagggcaaaggcggcaccaagaccctgatgaacaccatcatgcagctgcggaagatctgcaaccacccctacatgttccagcacatcgaggagtccttttccgagcacttggggttcactggcggcattgtccaagggctggacctgtaccgagcctcgggtaaatttgagcttcttgatagaattcttcccaaactccgagcaaccaaccacaaagtgctgctgttctgccaaatgacctccctcatgaccatcatggaagattactttgcgtatcgcggctttaaatacctcaggcttgatggaaccacgaaggcggaggaccggggcatgctgctgaaaaccttcaacgagcccggctctgagtacttcatcttcctgctcagcacccgggctggggggctcggcctgaacctccagtcggcagacactgtgatcatttttgacagcgactggaatcctcaccaggacctgcaagcgcaggaccgagcccaccgcatcgggcagcagaacgaggtgcgtgtgctccgcctctgcaccgtcaacagcgtggaggagaagatcctagctgcagccaagtacaagctcaacgtggaccagaaggtgatccaggccggcatgttcgaccagaagtcctccagccatgagcggcgcgccttcctgcaggccatcctggagcacgaggagcaggatgagagcagacactgcagcacgggcagcggcagtgccagcttcgcccacactgcccctccgccagcgggcgtcaaccccgacttggaggagccacctctaaaggaggaagacgaggtgcccgacgacgagaccgtcaaccagatgatcgcccggcacgaggaggagtttgatctgttcatgcgcatggacctggaccgcaggcgcgaggaggcccgcaaccccaagcggaagccgcgcctcatggaggaggacgagctcccctcgtggatcatcaaggacgacgcggaggtggagcggctgacctgtgaggaggaggaggagaagatgttcggccgtggctcccgccaccgcaaggaggtggactacagcgactcactgacggagaagcagtggctcaaggccatcgaggagggcacgctggaggagatcgaagaggaggtccggcagaagaaatcatcacggaagcgcaagcgagacagcgacgccggctcctccaccccgaccaccagcacccgcagccgcgacaaggacgacgagagcaagaagcagaagaagcgcgggcggccgcctgccgagaaactctcccctaacccacccaacctcaccaagaagatgaagaagattgtggatgccgtgatcaagtacaaggacagcagcagtggacgtcagctcagcgaggtcttcatccagctgccctcgcgaaaggagctgcccgagtactacgagctcatccgcaagcccgtggacttcaagaagataaaggagcgcattcgcaaccacaagtaccgcagcctcaacgacctagagaaggacgtcatgctcctgtgccagaacgcacagaccttcaacctggagggctccctgatctatgaagactccatcgtcttgcagtcggtcttcaccagcgtgcggcagaaaatcgagaaggaggatgacagtgaaggcgaggagagtgaggaggaggaagagggcgaggaggaaggctccgaatccgaatctcggtccgtcaaagtgaagatcaagcttggccggaaggagaaggcacaggaccggctgaagggcggccggcggcggccgagccgagggtcccgagccaagccggtcgtgagtgacgatgacagtgaggaggaacaagaggaggaccgctcaggaagtggcagcgaagaagactgagccccgacattccagtctcgaccccgagcccctcgttccagagctgagatggcataggccttagcagtaacgggtagcagcagatgtagtttcagacttggagtaaaactgtataaacaaaagaatcttccatatttatacagcagagaagctgtaggactgtttgtgactggccctgtcctggcatcagtagcatctgtaacagcattaactgtcttaaagagagagagagagaattccgaattggggaacacacgatacctgtttttcttttccgttgctggcagtactgttgcgccgcagtttggagtcactgtagttaagtgtggatgcatgtgcgtcaccgtccactcctcctactgtattttattggacaggtcagactcgccgggggcccggcgagggtatgtcagtgtcactggatgtcaaacagtaataaattaaaccaacaacaaaacgca

SEQ ID NO: 301 - DNA, 3772 bp, Homo sapiens
gggctgaagacaacttggattgcgaggctagggcttggggagtcgtgcatcccgttccgggcctccgcagcccaacatgggccccgggttccaaagtttgcgaagttgggcgccgaggggccggggcgcgcggagcgtccgggggggcccgggcccggattctctgggcgcacaggtcgcctgagccgcctccgcggccgccgaggtcgtgcgtgtggccggggggctccgaggagcaggcgggggcgccggggcttttgctgagttggcggggttggccatggccgctgcccgcccagcgcgggggccggagctcccgctcctggggctgctgctgctgctgctgctgggggacccgggccggggggcggcctcgagcgggaacgcgaccgggcctgggcctcggagcgcgggcgggagcgcgaggaggagcgcggcggtgactggccctccgccgccgctgagccactgcggccgggctgccccctgcgagccgctgcgctacaacgtgtgcctgggctcggtgctgccctacggggccacctccacactgctggccggagactcggactcccaggaggaagcgcacggcaagctcgtgctctggtcgggcctccggaatgccccccgctgctgggcagtgatccagcccctgctgtgtgccgtatacatgcccaagtgtgagaatgaccgggtggagctgcccagccgtaccctctgccaggccacccgaggcccctgtgccatcgtggagagggagcggggctggcctgacttcctgcgctgcactcctgaccgcttccctgaaggctgcacgaatgaggtgcagaacatcaagttcaacagttcaggccagtgcgaagtgcccttggttcggacagacaaccccaagagctggtacgaggacgtggagggctgcggcatccagtgccagaacccgctcttcacagaggctgagcaccaggacatgcacagctacatcgcggccttcggggccgtcacgggcctctgcacgctcttcaccctggccacattcgtggctgactggcggaactcgaatcgctaccctgctgttattctcttctacgtcaatgcgtgcttctttgtgggcagcattggctggctggcccagttcatggatggtgcccgccgagagatcgtctgccgtgcagatggcaccatgaggcttggggagcccacctccaatgagactctgtcctgcgtcatcatctttgtcatcgtgtactacgccctgatggctggtgtggtttggtttgtggtcctcacctatgcctggcacacttccttcaaagccctgggcaccacctaccagcctctctcgggcaagacctcctacttccacctgctcacctggtcactcccctttgtcctcactgtggcaatccttgctgtggcgcaggtggatggggactctgtgagtggcatttgttttgtgggctacaagaactaccgataccgtgcgggcttcgtgctggccccaatcggcctggtgctcatcgtgggaggctacttcctcatccgaggagtcatgactctgttctccatcaagagcaaccaccccgggctgctgagtgagaaggctgccagcaagatcaacgagaccatgctgcgcctgggcatttttggcttcctggcctttggctttgtgctcattaccttcagctgccacttctacgacttcttcaaccaggctgagtgggagcgcagcttccgggactatgtgctatgtcaggccaatgtgaccatcgggctgcccaccaagcagcccatccctgactgtgagatcaagaatcgcccgagccttctggtggagaagatcaacctgtttgccatgtttggaactggcatcgccatgagcacctgggtctggaccaaggccacgctgctcatctggaggcgtacctggtgcaggttgactgggcagagtgacgatgagccaaagcggatcaagaagagcaagatgattgccaaggccttctctaagcggcacgagctcctgcagaacccaggccaggagctgtccttcagcatgcacactgtgtcccacgacgggcccgtggcgggcttggcctttgacctcaatgagccctcagctgatgtctcctctgcctgggcccagcatgtcaccaagatggtggctcggagaggagccatactgccccaggatatttctgtcacccctgtggcaactccagtgcccccagaggaacaagccaacctgtggctggttgaggcagagatctccccagagctgcagaagcgcctgggccggaagaagaagaggaggaagaggaagaaggaggtgtgcccgctggcgccgccccctgagcttcacccccctgcccctgcccccagtaccattcctcgactgcctcagctgccccggcagaaatgcctggtggctgcaggtgcctggggagctggggactcttgccgacagggagcgtggaccctggtctccaacccattctgcccagagcccagtccccctcaggatccatttctgcccagtgcaccggcccccgtggcatgggctcatggccgccgacagggcctggggcctattcactcccgcaccaacctgatggacacagaactcatggatgcagactcggacttctgagcctgcagagcaggacctgggacaggaaagagaggaaccaataccttcaaggctcttcttcctcaccgagcatgcttccctaggatcccgtcttccagagaacctgtgggctgactgccctccgaagagagttctggatgtctggctcaaagcagcaggactgtgggaaagagcctaacatctccatggggaggcctcaccccagggacagggccctggagctcagggtccttgtttctgccctgccagctgcagcctggttggcagcatctgctccatcggggcagggggtatgcagagcttgtggtggggcaggaacggtggaggcagaggtgacagttcccagagtgggctttggtggccagggaggcagcctagcctatgtctggcagatgagggctggctgccgttttctgggctgatgggtgccctttcctggcagtctcagtccaaaagtgttgactgtgtcattagtcctttgtctaagtagggccagggcaccgtattcctctcccaggtgtttgtggggctggaaggacctgctcccacaggggccatgtcctctcttaataggtggcactaccccaaacccatcttttgttctcctatatcctccttctcctgttccatttcagttcagtttcagcggtgccaacctctttgcgtttcctttttgttgatgaggacccagagctgctgcacacactcacctctaaccccctcccctcgctgctgggccccatctccacaggagagactggttcggctctagggcctcagtctggagtgggataggagcagtgagtgacaaagcctctgaaagatgcatcatctcttcctcacacccatttagtgggggatgggtcctctagacttgaggggctaccctgggaagctgccgtagcttcagccaggcaagaaagcttccttcaacctgcatagccggtgggtgaggagattcccaccttccatagcctccaaacatgttcccaaggccccactttcaagaatcagacagcaggaagccatagatgctggctgggttccaggttatggggagaagaaatacagtcaataaaaggtttttgtataaaaaaaaaaaaaaaaaaaaaaaaaaaaaaaaaaaaa

SEQ ID NO: 302 - DNA, 4002 bp, Homo sapiens
atgcaggcgcagcagctgccctacgagtttttcagcgaagagaacgcgcccaagtggcggggactactggtgcctgcgctgaaaaaggtccaggggcaagttcatcctactctcgagtctaatgatgatgctcttcagtatgttgaagaattaattttgcaattattaaatatgctatgccaagctcagccccgaagtgcttcagatgtagaggaacgtgttcaaaaaagtttccctcatccaattgataaatgggcaatagctgatgcccaatcagctattgaaaagaggaagcgaagaaaccctttatctctcccagtagaaaaaattcatcctttattaaaggaggtcctaggttataaaattgaccaccaggtttctgtttacatagtagcagtcttagaatacatttctgcagacattttaaagctggttgggaattatgtaagaaatatacggcattatgaaattacaaaacaagatattaaagtggcaatgtgtgctgacaaggtattgatggatatgtttcatcaagatgtagaagatattaatatattatctttaactgacgaagagccttccacctcaggagaacaaacttactatgatttggtaaaagcatttatggcagaaattcgacaatatataagggaactaaatctaattataaaagtttttagagagccctttgtctccaattcaaaattgttttcagctaatgatgtagaaaatatatttagtcgcatagtagatatacatgaacttagtgtaaagttactgggccatatagaagatacagtagaaatgacagatgaaggcagtccccatccactagtaggaagctgctttgaagacttagcagaggaactggcatttgatccatatgaatcgtatgctcgagatattttgcgacctggttttcatgatcgtttccttagtcagttatcaaagcctggggcagcactttatttgcagtcaataggcgaaggtttcaaagaagctgttcaatatgttttacccaggctgcttctggcccctgtttaccactgtctccattactttgaacttttgaagcagttagaagaaaaaagtgaagatcaagaagacaaggaatgtttaaaacaagcaataacagctttgcttaatgttcagagtggtatggaaaaaatatgttctaaaagtcttgcaaaacgaagactgagtgaatctgcatgtcggttttatagtcagcaaatgaaggggaaacaactagcaatcaagaagatgaacgagattcagaagaatattgatggttgggagggaaaagacattggacagtgttgtaatgaatttataatggaaggaactcttacacgtgtaggagccaaacatgagagacacatatttctctttgatggcttaatgatttgctgtaaatcaaatcatgggcagccaagacttcctggtgctagcaatgcagaatatcgtcttaaagaaaagttttttatgcgaaaggtacaaattaatgataaagatgacaccaatgaatacaagcatgcttttgaaataattttaaaagatgaaaatagtgttatattttctgccaagtcagctgaagagaaaaacaattggatggcagcattgatatctttacagtaccggagtacactggaaaggatgcttgatgtaacaatgctacaggaagagaaagaggagcagatgaggctgcctagtgctgatgtttatagatttgcagagcctgactctgaagagaatattatatttgaagagaacatgcagcccaaggctggaattccaattatcaaagcaggaactgttattaaacttatagagaggcttacgtaccatatgtacgcagatcccaattttgttcggacatttcttacaacatacagatccttttgcaaacctcaagaactactgagtcttataatagaaaggtttgaaattccagagcctgagccaacagaagctgatcgcatagctatagagaatggagatcaacccttgagtgcagaactgaaaagatttagaaaagaatatatacagcctgtgcaactgcgagtattaaatgtatgtcggcactgggtagagcaccacttctatgattttgaaagagatgcatatcttttgcaacgaatggaagaatttattggaacagtaagaggtaaagcaatgaaaaaatgggttgaatccatcactaaaataatccaaaggaaaaaaattgcaagagacaatggaccaggtcataatattacatttcagagttcacctcccacagttgagtggcatataagcagacctgggcacatagagacttttgacctgctcaccttacacccaatagaaattgctcgacaactcactttacttgaatcagatctataccgagctgtacagccatcagaattagttggaagtgtgtggacaaaagaagacaaagaaattaactctcctaatcttctgaaaatgattcgacataccaccaacctcactctgtggtttgagaaatgtattgtagaaactgaaaatttagaagaaagagtagctgtggtgagtcgaattattgagattctacaagtctttcaagagttgaacaactttaatggtgtccttgaggttgtcagtgctatgaattcatcacctgtttacagactagaccacacatttgagcaaataccaagtcgccagaagaaaattttagaagaagctcatgaattgagtgaagatcactataagaaatatttggcaaaactcaggtctattaatccaccatgtgtgcctttctttggaatttatctcactaatatcttgaaaacagaagaaggcaaccctgaggtcctaaaaagacatggaaaagagcttataaactttagcaaaaggaggaaagtagcagaaataacaggagagatccagcagtaccaaaatcagccttactgtttacgagtagaatcagatatcaaaaggttctttgaaaacttgaatccgatgggaaatagcatggagaaggaatttacagattatcttttcaacaaatccctagaaatagaaccacgaaaccctaagcctctcccaagatttccaaaaaaatatagctatcccctaaaatctcctggtgttcgtccatcaaacccaagaccaggtaccatgaggcatcccacacctctgcagcaggagccaaggaaaattagttatagtaggatccctgaaagtgaaacagaaagtacagcatctgcaccaaattctccaagaacaccgttaacacctccgcctgcttctggtgcttccagtaccacagatgtttgcagtgtatttgattccgatcattcgagcccttttcactcaagcaatgataccgtctttatccaagttactctgccccatggcccaagatctgcttctgtatcatctataagtttaaccaaaggcactgatgaagtgcctgtccctcctcctgttcctccacgaagacgaccagaatctgccccagcagaatcttcaccatctaagattatgtctaagcatttggacagtcccccagccattcctcctaggcaacccacatcaaaagcctattcaccacgatattcaatatcagaccggacctctatctcagaccctcctgaaagccctcccttattaccaccacgagaacctgtgaggacacctgatgttttctcaagctcaccactacatctccaacctccccctttgggcaaaaaaagtgaccatggcaatgccttcttcccaaacagcccttccccctttacaccacctcctcctcaaacaccttctcctcacggcacaagaaggcatctgccatcaccaccattgacacaagaagtggaccttcattccattgctgggccgcctgttcctccacgacaaagcacttctcaacatatccctaaactccctccaaaaacttacaaaagggagcacacacacccatccatgcacagagatggaccaccactgttggagaatgcccattcttcctga

SEQ ID NO: 303 - DNA, 5313 bp, Homo sapiens
gcggccgccggcgaggcgaggcggcccgcgccctgcctgtcaggccaccggcccggcccgcgggctgcccccgatgcggaggcgctgtcgccggggccatgcagcaggcgccgcagccttacgagttcttcagcgaggagaacagtccgaaatggcggggactgttggtctcggccctgcggaaggttcaggaacaagtgcatcccactctctcagctaatgaagagtctctctattatattgaagagctgatttttcagctgcttaataaattatgcatggcccagccaaggactgttcaagatgtagaggagcgagttcagaagacctttcctcacccaattgataaatgggccattgctgatgcacaatctgctatagaaaaacgaaaacgaagaaatcctcttttactgcctgtggacaaaatccatccttcgttgaaggaagtattagggtacaaagtggactaccatgtatccctatatattgtggctgtactagagtatatctcagctgatattttaaaattggctggtaattatgtttttaatatccggcattatgaaatatctcagcaggacattaaagtgtcaatgtgtgcggataaggttttgatggacatgtttgatcaggatgacataggtttggtttctctctgtgaagatgaacctagttcttctggtgaattaaactactatgatcttgtcagaactgaaatcgcagaagaaagacagtatctacgggaattaaatatgatcataaaagtgtttcgagaagcctttctttctgatagaaagctgtttaaaccttctgatatcgaaaagatttttagtaacatttcagatatacatgaattgactgtgaaacttttaggtttgattgaagacacagttgaaatgactgatgaaagcagtcctcatcccttagctggcagctgttttgaagatttggcagaagagcaagcatttgatccttatgaaacattatcacaggacattctttcaccagagtttcatgaacatttcaataaattgatggccagacctgcagttgctctacactttcagtccattgctgatggttttaaagaggcagttcgttatgtccttccacgtcttatgctggtgccagtgtatcactgttggcactactttgagttactaaagcaattgaaagcatgtagtgaagaacaagaagacagagaatgtttgaaccaagctattactgctctcatgaatctccaaggtagcatggaccgaatttacaagcagtattcacctagacgtcgacctggagatcctgtttgccctttttatagtcaccaattaagaagcaaacacctggctatcaaaaaaatgaatgaaattcagaaaaatatcgatggatgggaaggcaaagatattggacagtgttgtaatgaattcattatggagggaccattgacaagaatcggtgccaaacatgaacggcatatttttctgtttgatggcttaatgatcagttgtaaacctaatcatggccagactcggcttccaggttacagtagtgcagaatacaggttaaaagaaaaatttgtcatgaggaaaatacaaatttgtgataaagaagatacttgtgagcacaagcatgcatttgaattagtatccaaagatgagaacagcataatatttgctgctaagtctgctgaagaaaaaaacaactggatggcagcccttatttctcttcattatcgtagtactctagatcgaatgttagattcagtattattgaaagaagaaaatgagcaaccactgagattaccaagtcctgaagtatatcgttttgtagtaaaagactctgaggaaaacattgtttttgaagacaacttgcaaagtagaagtggcatccccattattaaaggaggaactgtagtgaaattaattgaaaggttaacatatcatatgtatgcagatcccaattttgttcgtacttttcttaccacatatcgttcattttgtaaaccacaggaattgctgagcttactgattgaacggtttgaaattccagagccagaacctactgacgcagacaaattggcaatagagaaaggcgagcagccaatcagtgcagaccttaaaagatttcgcaaggaatatgtccaaccagtacaacttaggatcttaaatgtatttcggcattgggttgaacatcatttttatgactttgaaagagacttggaattgcttgaaagactagaatccttcatttcaagtgtaagagggaaagctatgaaaaaatgggtagagtcaattgctaagatcatcaggaggaagaagcaagctcaggcaaacggagtaagccataatattacctttgaaagtccacctccaccaattgaatggcatatcagcaaaccaggacagtttgaaacatttgatctcatgacacttcatccaatagaaattgcacgtcagctgacacttttggagtctgatctttacaggaaagttcaaccgtctgaacttgtagggagtgtgtggaccaaagaagataaagaaataaattctccaaatttattaaaaatgattcgccataccacaaatctcaccctctggtttgaaaaatgcattgtggaagcagaaaattttgaagaacgggtggcagtactaagtagaattatagaaattctgcaagtttttcaagatttgaataatttcaatggcgtattggagatagtcagtgcagtaaattcagtgtcagtatacagactagaccatacctttgaggcactgcaggaaaggaaaaggaaaattttggacgaagctgtggaattaagtcaagatcactttaaaaaatacctagtaaaacttaagtcaatcaatccaccttgtgtgcctttttttggaatatatttaacaaatattctgaagaccgaagaagggaataatgattttttaaaaaagaaagggaaagatttaatcaatttcagtaagaggaggaaagtagctgaaattactggagaaattcagcagtatcagaatcagccttactgtttacggatagaaccagatatgaggagattctttgaaaaccttaaccccatgggaagtgcatctgaaaaagagtttacagattatttgttcaacaagtcactagaaattgaacctcgaaactgcaaacagccacctcgatttcctaggaaatcaactttttccttaaaatctcctggaataaggcctaacacaggccgacatggctctacctcaggtactttacgaggtcacccaacaccattagaaagagaaccatgtaaaataagctttagtcggattgctgaaactgagctggaatcaacagtgtcagcaccaacctctccaaatacaccatctactccaccagtatctgcttcttcagaccttagtgtatttttagatgtggatctcaacagctcctgtggcagcaatagcatctttgctccagtgcttttgccacattcaaagtctttctttagttcatgtggtagtttacataaactaagtgaagagcccctgattcctcctcctcttcctcctcgaaaaaagtttgatcatgatgcttcaaattccaagggaaatatgaaatctgatgatgatcctcctgctattccaccgagacagcctcctcctccaaaggtaaaacccagagttcctgttcctactggtgcatttgatgggcctctgcatagtccacctccgccaccaccaagagatcctcttcctgatacccctccaccagttccccttcggcctccagaacactttataaactgtccatttaatcttcagccacctccactggggcatcttcacagagattcagactggctcagagacattagtacgtgtccaaattcgccaagcactcctcctagcacaccctctccaagggtaccgcgtcgatgctatgtgctcagttctagtcagaataatcttgctcatcctccagctccccctgttccaccaaggcagaattcaagccctcatctgccaaaactgccaccaaagacttacaaacgggagctttcgcaccccccattgtacagactgcctttgctagaaaatgcagaaactccccaatgaccttagccatatgtagtcattgacactggaatggtatttgtaaagttttttttttaatttattcaaaaaaagacatagtattttagtactttttacaaataatgctcttacaaaaatgctactgatcaaataagcttttaagaattggaaaaataaaaatacaaaagtccttcaccattatcctcaggtgatcagtagcattgccttgtcttggatcctcagtgctgccaaaaggccagtataaagaatttatatttgcactgtaaactctgcaaaaatatggtttaaagtgacatgattgcactgaaaagggatagtgcttttgtgaaatttttcaaatttgagtaatagatgcctttttaaggcagtgaatttacacaaatatgggaggggtatatggtgttactgatttttaaacctctttgaccatcttctagtttttacttctagtttttacatctaggagaattgtgaataacaccaactgttcttaaactctttaatgccatgtcttaaatgccggtatttgctgctgaagacaaaaatgaaaagtaggatgaaaataatagaatggcactgtaagtgtttattattttgtcaaaatgtaaacaaagactacataacccaatgatggagggaaaaagggcatgtatctcattcagatgtgccttttgtttttgcagactatgacgtctttagctaatgaattgcctattgttatggaaaacagttaatatgccatgtatgtacagttttgtttatattgtatatttaaagatactgctaataacctatataaatttaagtgacttgaggcctataatacaatctgctactttactaattcataaattcaaaaaaaattctatggcataggaaccaactgccttgccttcaagacctagtaactttctctataaatctcgtgttaactgaaattttttttaaatatattttttagattggtaatatttaaaccagcaaatacttaaagctttattaaacattttaatcagataagtgagtaaagcttttatttgccatttggatgccttcgttcaaagtgatagagtgttttgctgatagtgctgtagcagcagttgtaaagtagccaaaagccacgttgtttatttactggtttgtggccttttactgtgctttgtatcagagttcttaacaagattaataaatcaccccagtcttaatttttaaaaga

SEQ ID NO: 304 - DNA, 4108 bp, Homo sapiens
ccggccgtctatgctccaggccctctcctcgcggtgccggtgaacccgccagccgccccgatgtacagcatgatgatggagaccgacctgcactcgcccggcggcgcccaggcccccacgaacctctcgggccccgccggggcgggcggcggcgggggcggaggcgggggcggcggcggcggcgggggcgccaaggccaaccaggaccgggtcaaacggcccatgaacgccttcatggtgtggtcccgcgggcagcggcgcaagatggcccaggagaaccccaagatgcacaactcggagatcagcaagcgcctgggggccgagtggaaggtcatgtccgaggccgagaagcggccgttcatcgacgaggccaagcggctgcgcgcgctgcacatgaaggagcacccggattacaagtaccggccgcgccgcaagaccaagacgctgctcaagaaggacaagtactcgctggccggcgggctcctggcggccggcgcgggtggcggcggcgcggctgtggccatgggcgtgggcgtgggcgtgggcgcggcggccgtgggccagcgcctggagagcccaggcggcgcggcgggcggcggctacgcgcacgtcaacggctgggccaacggcgcctaccccggctcggtggcggcggcggcggcggccgcggccatgatgcaggaggcgcagctggcctacgggcagcacccgggcgcgggcggcgcgcacccgcacgcgcaccccgcgcacccgcacccgcaccacccgcacgcgcacccgcacaacccgcagcccatgcaccgctacgacatgggcgcgctgcagtacagccccatctccaactcgcagggctacatgagcgcgtcgccctcgggctacggcggcctcccctacggcgccgcggccgccgccgccgccgctgcgggcggcgcgcaccagaactcggccgtggcggcggcggcggcggcggcggccgcgtcgtcgggcgccctgggcgcgctgggctctctggtgaagtcggagcccagcggcagcccgcccgccccagcgcactcgcgggcgccgtgccccggggacctgcgcgagatgatcagcatgtacttgcccgccggcgaggggggcgacccggcggcggcagcagcggccgcggcgcagagccggctgcactcgctgccgcagcactaccagggcgcgggcgcgggcgtgaacggcacggtgcccctgacgcacatctagcgccttcgggacgccggggactctgcggcggcgacccacgagctcgcggcccgcgcccggctcccgccccgccccggcgcggcgtggcttttgtacagacgttcccacattcttgtcaaaaggaaaatactggagacgaacgccgggtgacgcgtgtcccccactcaccttccccggagaccctggcgaccgccgggcgctgacaccagacttgggttttagactgaacttcggtgttttcttgagactttttgtacagtatttatcacctacggaggaagcggaaagcgttttctttgctcgaggggacaaaaaagtcaaaacgaggcgagaggcgaagcccacttttgtataccggccggcgcgctcactttcctccgcgttgcttccggacggcgccgaccgccggagcccaagtgacgcggagctcgtcgcatttgttataaatgtagtaaggcaggtccaagcacttacaagttttttgtagttgttaccgctcttttgggttggtttgttaatttatacaaagagattaccaccaccaccccctccttcagacggcggagttatattctgggttttgtaaaactttatgtatctgagcatttccatttttttttttgggttttgtattatttcttgtaaatgcattgtgaaaaattttattttcggcgttgcaatgcggggaggagaagtcagattatgtacatagttttctaaaaagcctttcttctaaaaacgaaaaaagaccccccacccaaaatgtttcgagtcaacaaatttaagagacagagcccattttctccataaatttgtaacatgctatttttatgtgcatgttttatgagttcaaaatgcaatgaggaaatctgacagggaaattatctgtatgaactaaaagtaagggaaccccggggaatgggaggacaggatttttcaaggaacctttttcaatgaaagagaaggaagttaaaacctataggttattttgtagagctgagtgttaatacgggccgagaaataaaagtatcttctgctccggctgtttcactgcggacggctggggctgctgcgcgttaccttgctgcaagcggggcgccttccacctggctgggggtctgcgccacagtttggtccagaggagggaggaggaagggaagaccccagtggtgggaccctggaccaggccatggatgaaggacaaagaccagggcaggtcacgggtttcccaattccccagcaattaagatttcgagcagaatttatctaaatgtgtttcaaggaaacacaatcgctgaaccaaaacgtactgcagccgagccccctccgtccatcctctgcccctccccctggcttctttctcttgggaaaacgggcaaaataattgtgctggattctcacacacacagaaatatcgaccatcaccctcccccgcgtgaactgggatgcaagttgctaaccgatgtgaacgcaaaatgccttgttcattattcctgacgagatcttgaggttgtttgatgctttaaattttttaattatattattttctaggtgtttattggtacattgcagttttttttttgaaatttaaaaatttctgtaaaactttgtcttcaagtaatctgacagcattaaatattgcatttaaaaattatactgtagcaaatacatttaaaaattaatcacaacgttaagatgaaattatatttttggaaaaaaaaaacacttgaagcccagatggaaatacgtttatttcagcagccttaggtttcccctcgctttctcaacacccttccttgtcctggagtatggactgtccgtccaaaagtgagcctatgctataagtttaatgagaaccgaattcagcctgcattcgagaatagctttaagtataatgctgatctgacaattgacgtgtaatttgggaagtcattttgataattttgcttaaaccactcattcgttaaagtgattacaaaaaagttcaagaatgatgtccactgctttctaacaagataataaaccccccccctcttttctttttctttatttttatttcttttagctatttgatcctttctgaagcagttgtttctggaagagtctgtgcgcccatggatggctgagcaccactacgacttagtccgggataagggcctccccagtcctctccgggagatgatttgggaaattttataatgcttgttctgttaactcaccgggaccttgagggtccaatgggaccttgagggttttctctgaaatatacaaacttaaaggactctctctgaggttctttgactgacgtccactctcagtctggcccctgtgctcccctgtgtgtaccctggagtttctgtgtccaattgttggcatctaggtcttggctcaagattaggatgtgggccccactttagaggcacagactatgaaaagctgagttagtgcgcccgggacgccaggcaagcagcttttacagtttggcatcttattgcaggtgcttcgtgcacagtcagctgaaatagccaatgccaggtgctccaaccaccttatttccttgttttgttgattagaacaacacagaaaaaagcaaatataaatttttaatgactccatttaaaaatatcacagggtgggggcaaggaaattagctgagattcatctcaggattgagattctatccccccttccccgcccccagcagtgtcgctccaattcaaattagtggagaaaagattacagtaggccctgagccgactgtgaattcggtgcttggccaaggtaacactcatcgtattcacggagtgaaatactatatgatgatagttattatattatatgacgacttcattcacttcccaaatcacagggt

SEQ ID NO: 305 - DNA, 2882 bp, Homo sapiens
gtccggccagggtggttggtggtaaggattcaggctccgtcctaacgaggccgtggcctgaggctcagggccccccgcccctccctcccagcccaccagcgtcacctcccagccccgagctggaccgcacaccttgggacacggttttccacttcctaaggacgagccccagactggaggagaggtccgaggaggtgggcgttggactctttgcgaggaccccggcggctggcccgggggaggcggccgaggcggcggcggcggcggccgggggcgacatggcggaggagcaggacctatcggaggtggagctgagccccgtgggctcggaggagccccgctgcctgtccccggggagcgcgccctcgctagggcccgacggcggcggcggcggatcgggcctgcgagccagcccggggccaggcgagctgggcaaggtcaagaaggagcagcaggacggcgaggcggacgatgacaagttccccgtgtgcatccgcgaggccgtcagccaggtgctcagcggctacgactggacgctggtgcccatgcccgtgcgcgtcaacggcgccagcaaaagcaagccgcacgtcaagcggcccatgaacgccttcatggtgtgggctcaggcagcgcgcaggaagctcgcggaccagtacccgcacctgcacaacgctgagctcagcaagacgctgggcaagctctggaggctgctgaacgaaagtgacaagcgccccttcatcgaggaggctgagcggctccgtatgcagcacaagaaagaccacccggactacaagtaccagcccaggcggcggaagaacgggaaggccgcccagggcgaggcggagtgccccggtggggaggccgagcaaggtgggaccgccgccatccaggcccactacaagagcgcccacttggaccaccggcacccaggagagggctcccccatgtcagatgggaaccccgagcacccctcaggccagagccatggcccacccacccctccaaccaccccgaagacagagctgcagtcgggcaaggcagacccgaagcgggacgggcgctccatgggggagggcgggaagcctcacatcgacttcggcaacgtggacattggtgagatcagccacgaggtaatgtccaacatggagacctttgatgtggctgagttggaccagtacctgccgcccaatgggcacccaggccatgtgagcagctactcagcagccggctatgggctgggcagtgccctggccgtggccagtggacactccgcctggatctccaagccaccaggcgtggctctgcccacggtctcaccacctggtgtggatgccaaagcccaggtgaagacagagaccgcggggccccaggggcccccacactacaccgaccagccatccacctcacagatcgcctacacctccctcagcctgccccactatggctcagccttcccctccatctcccgcccccagtttgactactctgaccatcagccctcaggaccctattatggccactcgggccaggcctctggcctctactcggccttctcctatatggggccctcgcagcggcccctctacacggccatctctgaccccagcccctcagggccccagtcccacagccccacacactgggagcagccagtatatacgacactgtcccggccctaaagggggccctgtcgccaccaccccccgcccagcccctgcccccagcctgtgtgccctgttccttgcccacctcaggcctggtggtggcagtggaggaggctgaggaggctgaagaggctgacaggtcggggggctttctgtctggctcactgccctgatgacccacccgccccatccaggctccagcagcaaagccccaggagaacaggctggacagaggagaaggaggttgactgttgcacccacactgaaagatgaggggctgcaccttcccccaggaatgaccctctatcccaggacctgagaagggcctgctcaccctcctcggggaggggaagcaccagggttggtggcatcggaggccttaccactcctatgactcctgttttctctctcacagatagtgagggtctgacatgcccatgccacctatgccacagtgcctaagggctaggccacccagagactgtgcccggagctggccgtgtctcccactcaggggctgagagtagctttgaggagcctcattggggagtggggggttcgagggacttagtggagttctcatcccttcaatgccccctccctttctgaaggcaggaaggagttggcacagaggccccctgatccaattctgtgccaataacctcattctttgtctgagaaacagcccccagtcctcctccactacaacctccatgaccttgagacgcatcccaggaggtgacgaggcaggggctccaggaaaggaatcagagacaattcacagagcctccctccctgggctccttgccagctccctcttcccttactaggctctatggcccctgctcagtcagccccactccctgggcttcccagagagtgacagctgctcaggccctaacccttggctccaggagacacagggcccagcacccaggttgctgtcggcaggctgaagacactagaatcctgacctgtacattctgcccttgcctcttaccccttgcctcccagtggtatttgaataaagtatgtagctatatctgcccctattttcctgttctgcagccccccaaatccacatgtaactcattactgtctcctgttatttatctcagtagtcccctctcctagccactctagcccctattaactctgcattaagcattccacataataaaattaaaggttccggttaaaaaaaaaaaaaaaaaaaaa

SEQ ID NO: 306 - DNA, 8737 bp, Homo sapiens
acctccgcacgagacccagcggcccgggttggagcgtccagccctgcagcggatcatggtgcagcaggcggagagcttggaagcggagagcaacctgccccgggaggcgctggacacggaggagggcgaattcatggcttgcagcccggtggccctggacgagagcgacccagactggtgcaagacggcgtcgggccacatcaagcggccgatgaacgcgttcatggtatggtccaagatcgaacgcaggaagatcatggagcagtctccggacatgcacaacgccgagatctccaagaggctgggcaagcgctggaaaatgctgaaggacagcgagaagatcccgttcatccgggaggcggagcggctgcggctcaagcacatggccgactaccccgactacaagtaccggccccggaaaaagcccaaaatggacccctcggccaagcccagcgccagccagagcccagagaagagcgcggccggcggcggcggcgggagcgcgggcggaggcgcgggcggtgccaagacctccaagggctccagcaagaaatgcggcaagctcaaggcccccgcggccgcgggcgccaaggcgggcgcgggcaaggcggcccagtccggggactacgggggcgcgggcgacgactacgtgctgggcagcctgcgcgtgagcggctcgggcggcggcggcgcgggcaagacggtcaagtgcgtgtttctggatgaggacgacgacgacgacgacgacgacgacgagctgcagctgcagatcaaacaggagccggacgaggaggacgaggaaccaccgcaccagcagctcctgcagccgccggggcagcagccgtcgcagctgctgagacgctacaacgtcgccaaagtgcccgccagccctacgctgagcagctcggcggagtcccccgagggagcgagcctctacgacgaggtgcgggccggcgcgacctcgggcgccgggggcggcagccgcctctactacagcttcaagaacatcaccaagcagcacccgccgccgctcgcgcagcccgcgctgtcgcccgcgtcctcgcgctcggtgtccacctcctcgtccagcagcagcggcagcagcagcggcagcagcggcgaggacgccgacgacctgatgttcgacctgagcttgaatttctctcaaagcgcgcacagcgccagcgagcagcagctggggggcggcgcggcggccgggaacctgtccctgtcgctggtggataaggatttggattcgttcagcgagggcagcctgggctcccacttcgagttccccgactactgcacgccggagctgagcgagatgatcgcgggggactggctggaggcgaacttctccgacctggtgttcacatattgaaaggcgcccgctgctcgctctttctctcggagggtgcagagctgggttccttgggaggaagttgtagtggtgatgatgatgatgataatgatgatgatgatggtggtgttgatggtggcggtggtagggtggaggggagagaagaagatgctgatgatattgataagatgtcgtgacgcaaagaaattggaaaacatgatgaaaattttggtggagttaaagtgaaatgagtagtttttaaacatttttcctgtcctttttttgtcccccctcccttcctttatcgtgtctcaaggtagttgcatacctagtctggagttgtgattattttcccaaaaaatgtgtttttgtaattactatttctttttcctgaaattcgtgattgcaacaaaggcagagggggcggggcgggggaggggaggtaggacccgctccggaaggcgctgtttgaagcttgtcggtctttgaagtctggaagacgtctgcagaggacccttttggcagcacaactgttactctagggagttggtggagatatttttttttcttaagagaacttaaagaactggtgatttttttttaacaaaaaaagggaccattgcaacttttgttaatttaattttttttttttttttttttttttttttttttggagggagaaaactgatgtcttctatgcatccgattcttaacaaaactgcagggagcttgaaaaaatgcagactgtacaaacgcttacaaaaaaaaaaactgtgaactgacttaagatcagagtttacttttcagatcaaattgtttatggttttacaaatgtgatttctacttgccaactttttttttgtaacttgttcccttatacctccttgattgaataccagacagcctagacctcagtacaaaaggtattgaaacatttttgatacataacagacctcagtcttttttaaaaattaatatattttcaggcgtatttttgtacagtgaaaagggaacattcttgctgtgttttttcagtaagactttcaggcacttcttcccttttgatttcttttttttcctctgttttttagcatgcaagtatgttggtacgttatgtcctggtttaaaaaggattaaaattttaaaataatccttgcatctaaaggccttgtggtttaaaaaaaaaaagcaaacttttttttgtacagctatagtagagatttgttcaatatttgtaggtaaagatttattgaaaatggtgatatagacctcagagctgttatcttagtttaaagattgtatatgtactgtactatagtaggactttatgtatctcatacgctgtgatgtggatggggccccagatggaaggtttgaaactggattctcgatttttagcaaaaaagaaaaaaaaaaggcacatagtttaaaaagtttctcattttgtgcaatataatctaaataaagtacagaccatctgcatattttgtagcaaatggtggcaaagcagactcaatgcactgtcgacatcattgcctgtttttttttttttttttttgtgctggaagtctgtatcttgacaattttaataaatcagctggaactgatagaaactcgcatcgccaatagtctctatggaagtcaaactggaggtcctgttgtcgcagagcattcggtggtgaggctgttgtgtgcgcggatgaggggaggtggcaggagagaattctacatttagggggttaggctgaaaagtgttcaattagcaggctgatttctttttcctcttccgctagttgtgaaagacaggggaagggtgttctttctctctgccctccctttccatctccagctccccatttcctttctcacctcctcctccactccctgcctcttctccccacccatcctggcgggcgggctgcgcggaggctcgggagctggccggggaggggcggatggaggggcctgggttgccagctcccttggtcggggtcctgctcgctggggcttgtgtgttctctgcggcgggccgcgtccccgctgagcctcgcggtgacagccgcctttggcagcgagcgctcggggcacttctatccccgcctctcaaagggtggggacagccgtttccagatttgaattttttctgttctttatttttaacgctgcatcttcgcgtgtgctcagaggtggttgttggcggagaacgccgccgcagtgtttgacctctagcggtgaagggggaaggggaagaggaaaggagagaagtggtcggtgtctgtttccttctgtcccccggggccgtggagctgtcggagggaaggaggacggtgcggggccgcagggggcgcggggcgcggcgggacccaggctacgagcgggagggaggcgggagtcgggggaagacgcggcaggccggccgagggcaccccgaggaacatggcatggcctctgtgcgatccgagtcgcggtctccggggtgcctgggagggccgaaccactggtgagggcgtggggagcagggggtggcagagggcacccgggcggtagtccgggacgcgcaaggcagagccctgacgctccgggtccccgtgcctggctcttcttgcctcgccaccgcgtgctcctgggcgcgccccgccgcgggcccttgaggcgcgcggagacaccagcgctggcttcccgggcccgcgggccggggagggaagcctcggggctgcggggtgagaggaagaaagcaaacccggggagcaggcggctgccgcacccgcgcaccccgggccctcaccacgccctccccgcgcgccggctcaggggctgccccggaatcagctccccggggccgccgcaacgaaggtggatccgcatcttgattgttctccgggagcctcctgggggctccggcggcggcgcgggcgcgacccatcccgctggcgctccccgctcgctgaaccccgtttgcctgtccacaccccctcgctccccaccatttttcctgaccggcctgtgtccccgagccctcgcggcaggcccgagcaggcgatcgcggccgggcacgcgcgccccgggctcccgccccccttccgagcatccgccgcctcttttctgctgggtctgggaggagggaggctgggaggccgctcggggcccagcgtgccagccccggagttcagcctcccgagctgcggcgcccgcagcggaggaggttttcagtggctgattgaaactcactgcaaaatcaccacgactctttcacctactgagatgattgaccgaggtttggccttccatttttactgagatttggcgagaccgaatggaagcgtccgcacagtaactgcagctgctaggccagaggggccccggcgcccttcccgcctcccctcccgcttgcttttgccttactcgatcttaccaccacccctcccccggccccccgactgagaactcgggcctctcacccgccccccagcctcccgctctgggcgagcctcctccccagcccccacccctgggatgcgaagccagcaagcttttgctgcagatggacaggtttcttttctgtggctttttcctttcgataaaccatcagatttcagtagtacatttgggaaaagaaggggctgatggcgttaaccaggttctcaatatagaactggatttctggagttgtttaccttaccccacaccccctcaacatgtagactaatgcagccattggtggtacatttattttagccacggataattgaaccagcggtttacaattgacacgtgctccgtgctggtgattttatgtggcagccctctgctgcagttccgaaacttgttggcaacgtaaacccattgataggctgatctatgtattttgaaagcctgaaaacttggcatgtcttttctgttttaatcatagatgaatcttggacattttctgtggtgaggtggaaactttaagtaaattagtaaagtaataatttggcttcagaatgggaagagatagtcaagattttttttttttaaagccatgtggcctaacttgatacaaaaataaaagtaattgtttggcaatctaaatttaaaacctgttagaactcaggacaggcgcttcaatgcgctttttaacaatatttaaggctgttttgatgagtgcgttgtgagaatcatcttaatgaattctttattgagtgtctaaaacatagtataatacacatggtattcttgccactggatagtcttcaataaaagtttaattgatttttttttgttggtctcttaagtaagtcttatttttaactaagcattgacagaatatcttaaaatggtaacctgggggtggcgggtgggtgctgtgtgcacggcagcctagccagtggggatcctgctgtttattataagtagttcacagactctgatggcattttggtaagctttccatctttaagaaattgaaccagcattctcttattaattctttaaactgtggaagtaatttccagttcttacactctgatacgcatcccttttatttaaaaaaaaaaaaaatgctaataaaaggcagtgtacttaaactgtgctttgcaaatattgtgtatgttatgaatgactacagacactgggcaaattatttgtagaatgattatcctttagctagagaaagaaatcattacaactcttttgggcagagatgtttctttttaatgttaatcaaggggaagtgatttaaatatgcataaatgtagcagtcagggtgatttagttgcttttttcatgaaagaaaaagactcaaaagacaagacttatttttctcttctgggacttgaaatcataatcatctgatattagtacagtacaagaaatttacatttgttttttacttcagaatttaagtgacttttgcccaaggaatttgagaaataaggcaaataagttgctctattttaaagtagtcattcaatataaatatattatatcaatcttaacttttttattctctgatatgattaataatatgtatattcttacttttcttctaatgggcatatgtatccttgtggacactttgagagaggttttcttggactctcccatttatagaatctttatactcttttactgtgtggttccctgcttttaacagatttctgaggcaaatatatttgtgcttttttcttatgtaggaagaccagcgaaaatagtttactgagttgtcaattttatcagtagataagaaactttctttattacagtttcagggaagattttttcaggatatttctcagttattctaagggccaaattttgtaaaatttccattaggaatgtcagtttcaaataccctttgtatagcctaagcctgtgaggataacaagaatgagccttacctatcctaacacagggatttacaagttcccaaagtaaccgtctccatgtaactcttgacatacttttctgagatttggcttatttttattattggttatttctcactgttcattctatttgatttattctacaacatccccttttatttaatgatctggaaaattctgctctttgataacaactcaggatttttttgttcagttttggtttttgccccttcctgtggagcctacattttcaaccacaataaagatgaaacaaaatttatgaaactgagctctcttccattttacttactgctggcttttttttttttttttttccttgattcctaccataccttcgtttttttcattgtacttttttaacactacctatatccattagctgcctaattagttttatctgttccatgtggatgcagtgagtttataagagaatttcacaaacaagtagttttttagtgaacttaaaataaacagaattttaaaggagacctatttttatactcaataaaagcacaaaagtgcagaaagtataaaacggcttacaaagggagacacaagctcataatgttccatgtataaaagtaataactttattgggtagagatattcttacaagatctagcacctctgccagtgcacagataggactgttttaaatgatttgggaacttttggttgcctgcagttgtgaacagagaacttctctacagagaaacaaaccactaaaagcaatatgaccgagttgagatgtggtttccaatgagcaattggtgaatttaagcaacctggatgtgcatatgtggaggctcccgtctcactgtttgatcaaacttcttttatgtagtcacgtagacttgattttttctgctgtgaaaatgaaaaaataaagcaatatgacaaaaagtttaaaaatgcataaaaaataggatttcctctaggctcctcgaagagatttttttaatatgatgcttgtcttactttcttagacacgttacatttccccttccaaaaaaaaaaaaaaggacaactggaagtaatttatcatataaagaattttgatcaaatagatattgacaaagggccctctgtcacatttttcttcatccagcttttgttcaaaaacagtatgcctcctcccttgaatcacatagggagaaacgttatactccattctcattaatttcccattttgtctacttttactcttgtacatatgttgtgggtttaagagtcttttgcatttgttctgtgacacctttttttgaattgactgttttaaaacggaggcctattttttccggtttgggactcctagtggttatggcatcccataatgcttcgtgacggccaccaggacagaaccacctgatgttttagagcagttttcagcatgacactgttaacaagtgtgtattttccaaggccacatgaaacttactttcttagccactccaggtttgggagcagaaaagctgaaaaacccttttgtgtagaagtctgagtggtttgtgggggggaccttttttagagtttgcatgccagcgcacggcctattgctgtgaaacagagagaaggtaaagctacctgaggcagtgcgctggaggatgaagtgtttgatagcactaggggggaaagaaaatgcatggcaaagtttcgtcttctcgtagactatctagcatgcagagtgtagtgtgttgaaacggtgtatgacattgctgtatcaaagttgtaaaattaagcattatttattgaaaactatgtatttttttgtaaaaacctgatcacatagagaatatcagtggcttgtgcttgtgcttcgatctaaccagcttcttgacccacccccccttggtatgcagtgttaatgctcagggttgaaaatagtacactccaatgtctcttttgcaagagtttttcacagaggattacatttgttcaaaagactctaataaaattgtgtgatcaatcttcaaaaaaaaaaaaaaaaaaa

SEQ ID NO: 307 - DNA, 4645 bp, Homo sapiens
ccgcggcggagccagaggctgcaggaagagcccgcgggggcccggagggtgcgattcctcggcccccgcaaaacaatgtgtgttgtgagccaggacgcaacttgccggaggcggcgggggcgcgccgagcccgcctgagaccgcgctgaccttctccccccgccgtccgttgggcccgagcgcccagctcctcgctccccagttcgcgggggccgggccgagccgcggggcggggccgcccctccgtcgccgctgcctcctcccccacccccagccgcggaggatgcggacggcccccggcggcgtctagcggccccgggcccaggcgcgatggtgcagcagcggggcgcgagggccaagcgggacggcgggccgccgcccccgggacccgggccggccgaggagggggcgcgcgagcccggctggtgcaagaccccgagcggccacatcaagaggccgatgaacgcattcatggtgtggtcgcagcacgaacggcggaagatcatggaccagtggcccgacatgcacaacgccgagatctccaagcgcctgggccgccgctggcagctgctgcaggactcggagaagatcccgttcgtgcgggaggcggagcggctgcggctcaagcacatggcggattacccggactacaagtaccggccgcgcaaaaagagcaagggggcgcccgccaaggcgcggccccgcccccccggtggtagcggtggcggcagccggctcaagcccgggccgcagctgcctggccgcgggggccgccgagcagcgggagggcctttggggggcggggcggcggcgcccgaggacgacgatgaagacgacgacgaggagctgctggaagtgcgcctggtcgagaccccggggcgggagctgtggaggatggtcccggcgggacgggccgctcggggacaagcggagcgcgcccaagggccgtcgggcgagggggcggccgccgccgccgccgcctccccgacaccgtcggaggacgaggagccggaggaagaggaggaggaggcggcagcggctgaggaaggtgaagaggagacggtggcgtcgggggaggagtcgctgggctttctgtccaggctgccccctggcccggccggcctggactgcagcgccctggatcgcgacccggacctgcagcctccctcgggcacgtcgcacttcgagttcccggactactgcacccccgaggttaccgagatgatcgcgggggactggcgcccgtctagcatcgcagacctggttttcacctactgagcccaccgtcagcggggcgcgcacgcccccaaaccagctgtttacatacaggaatcaggtattggggcccctcggaggccgaggctggcaccccatctcccgcgcagcctgccccctcctggacgtgcccatcccccctcagatccagacatgcccctcccccgcagacacaccccaaggcagcccaacccccaccccttccccgacacccaagcccctccccacgtcgccccctcctgcacagccaccagcagccagccccctccgatacacctcccgtcctctcctacagacctgcacccctccccccttttgcacacgcccctcctcgtggccggaggacccgccccctcctttgctccggaatctctcctccctcgcccggcccgccttctctgggttaggggggcgatgcggccgggtggcaacgcacgcgcctcctgcgcccctcccttccctggggggaggggcgcaccccttttatccccggagcgctagggcccgcccctccgctggggcccacccccttcgtgcgcatgcttaatgcttctggggaggagggggctggtcccagcggagccgcactcttcgcccgctccgggcaaaagcgggggcgagtgtagagcgatcctgggaaatcctttgatccgggagccctaggtttcctctccagccaacggggcgtcgctgccttaatgggaggagcactcggaagggttggtttgggcctgaaactctcccaagtggcatagccccttttccggtatggggtctcctacacccacgcgcaccacctctccggtcgcgtggctgcctctacagcctacctatacgtccctttttccccccaactgggaattgagaggtaaggtctttctctggaaatccagcagtagaggaagggaccacccaagaaaactaaaaaccaaggcaccttaccagtctgtctggggacaggatccctgctgcaccttccccaccccctcctgggaagtgccccctcacctcagggcacccgcaacctgggctcctccctgagcgcaccggcccttcctgtcacccaggtccaccctcagtactcaagctgcagtatacagcgggaaaaactgaggcactttggtgctaggggtttgggactgaggcgtggagagcagatgtgatggcaggaagactctcgcttttaaacatctggtttgggagagaccatcgacttggccagtgagactgagaatggattccgagtagtgatgggccgtttgcacctcggtttttccacgtgagaaatggggagaacgctgctgttaggaggaagttgtgtccagttcagggtgccctcgggagccctgtccctgttgctgtggcccctctcacgccgccatctctctgccccgccccgcccctccggcctccccacaccccccttgccctcactacctgtatctcaccggcgtgtgttcaccctcccgggtggctcacacactctcattcacacacacaaatctcaggaacaaacggtcccagagtcctccggacccctgcccagggtctctgcaggtctctgccccacgcgttcccgtcgctgacaaagccaccagctgcctcctttaagcttggtgctccggctctgggcctttcttgcgctctattttttttttttttttttttaagaaaaacaacaacaacaaaaaaagacaatgaaaaaaaaaacgtcatgtgagtgaagagatgtcactgtctgtggtcttggagaactagtctcgtagctgaggggtggggtccctctgtctggggcactggcacccacagcaggactccgccagtctgatgccaggactgaataaagtgtatttgccccgaccttgccctgtggttctgcatgtctgtgctcttcctcaaccctccctaaacagtttgccagattcaagtccgtgtgatttgggcccgagctgggtgtcccagggcaagccaccttgcctgtctaggcctctatgtcaggactccctggccttcatgaagaatagcaaactcatccctgtagggaccaggcaggtaacatagacgagtgactctgggtggacagtggtgtcatgacccacttcaaggggcctacctcctgccagttgtgaccctgtgggaatgcagtccacagtggccaggtggccagatttttcaagaaaagctggatggatgtttctgagtcatcttaatttcaaaatgagactcatattttaaaatttctgtgggccaaatgaaacaagtatgcaggcaggtctggtccgagggggctggcttggccatgcctttctgtgcctttaatgaggactaagaagcaagattgggccacactgtctggactcaaagcccagctccaccactgagcacccgtgtgactctttccatatgtataacgtggggataataataatagctgcttcacaggatgaaatgaagtttgaggtgagaagcattcaccatggtgcccatcgtgttactccattgtcagaggaggaaacggggtcaggcaggaaagcaacttaaaggagggcctgcaagcagccagggtcagagacagggcttggttctgcttcctggtgaagcatggcttcggggtgctgcctctccctccctgtttgaatctgcagattgtgttaggcccccagctgagggcctggagtggtgggattggtcccagtgcctggcgcacattggcctgcagagtagattaactgaatgaccaaagagcaacagaagtctagtgattcttgtctttgaggttctgactggtgttttacaactgagtccaaggcttttccctcctttgtccctctgacacccctccccctaattctcatctgtcagatccagtgtattcctaagctgggacaaagcctctgttttcccagtaggagccagggctgagtgtggaaattacagtgactgcttcttctcagcttctctggttgaaagcaagctggcgaagtaagaggaggtagagttgagaaggtgtggaagatagggacagctgcccccagaactcccttcaagggaggacttccccagctatgggaagtgccatcagggtggccgcagctgcagagagccacttcacctgagaccacgcccttcctggggcagcctgtatctggtgtctgagtgaggcatggtataaacacctggtcatttcaatccaacatgggacggacactgacagacagtactcccagcaggcccaggccagccagggcttcgtcaggcctgcagcacaatttgacttcctatgcccaggcctgcttcctcttcttcctcttcttttcacaggtgcttattcctaataaacatcttgcaacccaaaaaaaaaaaaaaaaaa

SEQ ID NO: 308 - DNA, 4088 bp, Homo sapiens
cgcctcgcagcagcgagccgcgagcgcccttctccagtcccggcttggaactgaactgtgtgagcacgggtcctggaacccgggcccagaaccggcgagcccaggtctgagcccagagctcagcggtcagcctcgtaggccctgactcggaatcgagccgaggcgctgaggttggagccggagagcgtgagagccgaagagcagggagggcgggccggctgcgcgtccgacgagtcgcagagcaggaccgcggaaggcagggagacggccgcaagcccagggcagagggcagagggcagagagcggcctggctcggcggagagggcgccgcccggccggaaccaagctcgccgcccgggacggcgggccccgtggggcgcggacccagggtggccgtgggtccgcagcgactccccggccgacggcggggggcgtgccccctcccagcccagcctccccaacccggcccgcccgccgcgtcgcgggggcatgtgagcgggaagcctaggctgccagccgcgaggaccgcacggaggaggagcaggagcgcggagccgcgagccccgagccccgagcccggcgcctggctgagtagatgtccatgaggagccccatctctgcccagctggccctggatggcgttggcaccatggtgaactgcaccatcaagtcagaggagaagaaagagccttgccacgaggccccccagggctcagccactgccgctgaacctcagcctggagacccagcccgggcctcccaggatagtgctgacccccaagctccagcccaggggaatttcaggggctcctgggactgtagctctccagagggtaatgggtccccagaacccaagagaccaggagtgtcggaggctgcctctggaagccaggagaagctggacttcaaccgaaatttgaaagaagtggtgccagccatagagaagctgttgtccagtgactggaaggagaggtttctaggaaggaactctatggaagccaaagatgtcaaagggacccaagagagcctagcagagaaggagctccagcttctggtcatgattcaccagctgtccaccctgcgggaccagctcctgacagcccactcggagcagaagaacatggctgccatgctgtttgagaagcagcagcagcagatggagcttgcccggcagcagcaggagcagattgcaaagcagcagcagcagctgattcagcagcagcataagatcaacctccttcagcagcagatccagcaggttaacatgccttatgtcatgatcccagccttccccccaagccaccaacctctgcctgtcacccctgactcccagctggccttacccattcagcccattccctgcaaaccagtggagtatccgctgcagctgctgcacagcccccctgccccagtggtgaagaggcctggggccatggccacccaccaccccctgcaggagccctcccagcccctgaacctcacagccaagcccaaggcccccgagctgcccaacacctccagctccccaagcctgaagatgagcagctgtgtgccccgcccccccagccatggaggccccacgcgggacctgcagtccagccccccgagcctgcctctgggcttccttggtgaaggggacgctgtcaccaaagccatccaggatgctcggcagctgctgcacagccacagtggggccttggatggctcccccaacacccccttccgtaaggacctcatcagcctggactcatccccagccaaggagcggctggaggacggctgtgtgcacccactggaggaagccatgctgagctgcgacatggatggctcccgccacttccccgagtcccgaaacagcagccacatcaagaggcccatgaacgccttcatggtgtgggccaaggatgagcggaggaagatcctgcaagccttcccagacatgcacaactccagcatcagcaagatccttggatctcgctggaagtccatgaccaaccaggagaagcagccctactatgaggaacaggcgcggctgagccggcagcacctggagaagtatcctgactacaagtacaagccgcggcccaagcgcacctgcatcgtggagggcaagcggctgcgcgtgggagagtacaaggccctgatgaggacccggcgtcaggatgcccgccagagctacgtgatccccccgcaggctggccaggtgcagatgagctcctcagatgtcctgtaccctcgggcagcaggcatgccgctggcacagccactggtggagcactatgtccctcgtagcctggaccccaacatgcctgtgatcgtcaacacctgcagcctcagagaggagggtgagggcacagatgacaggcactcggtggctgatggcgagatgtaccggtacagcgaggacgaggactcggagggcgaagagaagagcgatggggagttggtggtgctcacagactgatcccggctgggtgggcctggccccttctcctctggggaagaccttgtcccaactcgatgggcacagccagccaacctaagactatgttggtacttggacttgttcgtgccccagagatgggcaaagctgtgcacttgcagatacattcatgaggggagaggcgccctcccttcctgaggagctgttggcctgggtgggcaggaactgcagtatggccatgggctgagcaggctgagcacctcagcctttagggcttatggccaggggacactgtatgactctcctctcctgcaggtgtctatccacctggggtatggcatctaccgacctgtctccctggggtcacatgctttgtttccattcttgtcctggctggaccagccactgtgggaccaacacccctcccacactcccccagactgctcgtctatcaccaggatcgctttgtactttgtgcaaaagggtctggctgtcccttgctgttttcatctctgccaagcctattgtgcctctggctgctgtatgtgtgcgcgtgcacgtgtgtgtgtttcatctgttcattcactgcacaagatatttattgagtgcccactacgtgccaggcactgttgctgagttcctgtgggtgtgtctctcgatgccactcctgcttctctgggggcctctttctgtgcttctctttgtccccaaattgctacctctttgtcagtctgggtgtctcaggttctgtgtgtccttgtgtgcatttctgtctctctctgtcctcgtctctctgcaaggccctctatttctctctttcttggtgtctgtcctttgccccctgtgccctctggattctctgggtctatgtaggcccctggtctgccctgggctcatcagccttcctgacctcctcctgccctccccttcactccctccctggctctgccagtcggttcccacggagccatttttagctctgatcagcatgggaatgtgcctcggcctccaaggggctttgtcctggtgcccccgcccctggtcccaacctgatcccacgagggagttgggacaggaggattgatggtgctccccttcctgccagcgtcagaggccctggagaggggctgtccatggcagctggtctttattcctccctcatgagcacagggtcgggggggtccccattcttggaagaggttgagaagactcctgggcttcagcctctcccacccagccctgcccctcacctgcctgccctcccctcccccactctatactagggactggatctcagcctctgatcagtttcacaaagtttgttccctaaggaaatcaaatcccattgtcacctaactctgaagatctaaatagcccttggatcagtatgggaaccccaaatcccacagggccagatgtggagtctgtgtctgcccccgtcttctctccatcctcaaagcccccacttctctccaggctgtttctttttttatgactgtaaacatagatagtgctttattttgttaataataagataatgatgagtaacttaaccagcacatttctcctgtttacactcgggggatttttttgttttctgatgacataataaagacagatcatttcagaaaaaaaaaaaaaaaaa

SEQ ID NO: 309 - DNA, 818 bp, Homo sapiens
tgcagaacccttgcactccctacccccacccacctagccgccgggaccatgtccaaaccttcagaccacatcaagcggcccatgaacgccttcatggtatggtcccggggccagcggcgcaagatggcccaggaaaaccccaagatgcacaactcggagatcagcaaacgcctaggtgccgaatggaagcttctgtccgaggcagagaagcggccatacatcgatgaagccaagcggctacgcgcccagcacatgaaggagcaccctgactacaagtaccgacctcggcgcaagcccaagaacctgctcaagaaggacaggtatgtcttccccttgccctacctgggcgacacggacccgctcaaggcggctggcctgcccgtgggggcctccgacggcctcctgagcgcgcccgagaaagcccgggccttcttgccgccggcctcggcgccctactccctgctggaccccgcgcagtttagctcgagcgccatccagaagatgggcgaagtgccccacaccttggctaccggcgctctgccctacgcgtccaccctgggctaccagaacggcgccttcggcagcctcagctgccccagccagcacacgcacacgcacccgtcccccaccaaccctggctacgtggtgccctgtaactgtaccgcctggtctgcctccaccctgcagccccccgtcgcctacatcctcttcccaggcatgaccaagactggcatagacccttattcgtcagcccacgctacggccatgtaacccccagcccggcccggacctgaggcgtggtctgaaagccgggtctg

SEQ ID NO: 310 - DNA, 1394 bp, Homo sapiens
ttaaggaggtgcagtcttatgggagggacaggggcggagtcagtctttaaaagctgttcccaggtctggcccgcctgccacaaacgctgagcccaggtgggagaggtctggcctatccgcgcctggcagctgtcggaactccggagaccacaaaggggtttatggtttaccccctccacggaaggtcggtctgatcgcagctgcgggtcggggagagggaccgggggtcccccagtcagtaggcctcagaacacctcttcagtgccggggcaccagacagcggattttgcattcgactctccccaaagtgtgccgaacaggttggaagcaaaggctccggtttaagctctgggcttggggataaaatacactttttaaggacccaagttcctcggcaacgactccagactgggaagacctttccattttcaggatcgacgcttcacgttgaggggagggcattcaggacgccctcttaaggcttctcccaacccatggcgctaccaggctcctcacaggaccaggcctggagcctggagcctccggctgccacggctgctgcctcctcatcttcgggaccccaggagcgggagggcgctgggagccccgcggcccccgggacgctgcccctggagaaggtgaagcggccgatgaacgcgttcatggtgtggagctccgctcagcgccgccagatggcgcagcagaaccccaagatgcacaactccgagatctccaagcgcctgggcgcgcagtggaagctgctggacgaggacgagaagcggcccttcgtggaggaggccaagcggctccgcgcccgacacctgcgcgactaccccgactacaagtaccggcctcggcgcaaggccaagagctcgggcgccggaccttcccgctgcggacagggaagaggcaacctggccagcggcggcccgctctgggggccggggtacgcgaccacccaaccgagcagaggctttgggtacagaccccccagctactcgacagcctacctgcctggcagctatggctcttcccactgcaaactggaagccccctcaccgtgctccctccctcagagtgaccctaggctccagggggaactgctgcccacctatacccactacctgccccctggctctcccactccatacaaccctccccttgctggtgcccccatgcccctaacccacctctaaccctcatggacgcagacctcacgggacgggcctcatcctccttttttaatccagcagcatcccctaccccaggctgtcaaccctttctcctgttggactacagttcagaggcagcctgcagtcctcccatgatagccagggagagccgcacaacatacaattatatttttggtagtattaaacagttttgtattattc

SEQ ID NO: 311 - DNA, 2350 bp, Homo sapiens
gcagtgtcactaggccggctgggggccctgggtacgctgtagaccagaccgcgacaggccagaacacgggcggcggcttcgggccgggagacccgcgcagccctcggggcatctcagtgcctcactccccaccccctcccccgggtcgggggaggcggcgcgtccggcggagggttgaggggagcggggcaggcctggagcgccatgagcagcccggatgcgggatacgccagtgacgaccagagccagacccagagcgcgctgcccgcggtgatggccgggctgggcccctgcccctgggccgagtcgctgagccccatcggggacatgaaggtgaagggcgaggcgccggcgaacagcggagcaccggccggggccgcgggccgagccaagggcgagtcccgtatccggcggccgatgaacgctttcatggtgtgggctaaggacgagcgcaagcggctggcgcagcagaatccagacctgcacaacgccgagttgagcaagatgctgggcaagtcgtggaaggcgctgacgctggcggagaagcggcccttcgtggaggaggcagagcggctgcgcgtgcagcacatgcaggaccaccccaactacaagtaccggccgcggcggcgcaagcaggtgaagcggctgaagcgggtggagggcggcttcctgcacggcctggctgagccgcaggcggccgcgctgggccccgagggcggccgcgtggccatggacggcctgggcctccagttccccgagcagggcttccccgccggcccgccgctgctgcctccgcacatgggcggccactaccgcgactgccagagtctgggcgcgcctccgctcgacggctacccgttgcccacgcccgacacgtccccgctggacggcgtggaccccgacccggctttcttcgccgccccgatgcccggggactgcccggcggccggcacctacagctacgcgcaggtctcggactacgctggccccccggagcctcccgccggtcccatgcacccccgactcggcccagagcccgcgggtccctcgattccgggcctcctggcgccacccagcgcccttcacgtgtactacggcgcgatgggctcgcccggggcgggcggcgggcgcggcttccagatgcagccgcaacaccagcaccagcaccagcaccagcaccaccccccgggccccggacagccgtcgccccctccggaggcactgccctgccgggacggcacggaccccagtcagcccgccgagctcctcggggaggtggaccgcacggaatttgaacagtatctgcacttcgtgtgcaagcctgagatgggcctcccctaccaggggcatgactccggtgtgaatctccccgacagccacggggccatttcctcggtggtgtccgacgccagctccgcggtatattactgcaactatcctgacgtgtgacaggtccctgatccgccccagcctgcaggccagaagcagtgttacacacttcctggaggagctaaggaaatcctcagactcctgggtttttgttgttgctgttgttgttttttaaaaggtgtgttggcatataatttatggtaatttattttgtctgccacttgaacagtttgggggggtgaggtttcatttaaaatttgttcagagatttgtttcccatagttggattgtcaaaaccctatttccaagttcaagttaactagctttgaatgtgtcccaaaacagcttcctccatttcctgaaagtttattgatcaaagaaatgttgtcctgggtgtgttttttcaatcttctaaaaaataaaatctggaatcctgcttttttgctctactagtacctctgtcacactagtcttatcaaaaaccagttcttaagatcaatgttaagtttattagttaatgtaaatttctcatcctcgaaaagggtgaacataaatgcctttaaggagtatatctaaaaataaacattaggatatctaagtttgatgtaattgtttcaggaaggaaaaaagaaaagcattctggaatgagcctacttcaagtaatcttagtttctaaaactaacagttaatattttcaattccagtatatcactttaagtagaaggggatgtccaagtaattttggttttctaactgttgaatcataagcttgacctgcccccagaggctttttggatgtttttatctgtgttttgccatctctttacactcctcgacattcagtttaccttaatcttcacatttttacaccttgggaagtggcaagcatcgctgggtttaagataaaggagtcacaaaaactaatcaaaataaaatttgcattatgacaacttttaataca

SEQ ID NO: 312 - DNA, 1718 bp, Homo sapiens
ccgccatccgccctcccggcctggcctgcccttgcgcccggctccccagtgcccgccgcccgcccgccgcgctcccgcgctccgttccgcccaggccgcgcccagctggaatgcagagatcgccgcccggctacggcgcacaggacgacccgcccgcccgccgcgactgtgcatgggccccgggacacggggccgccgctgacacgcgcggcctcgccgccggccccgccgccctcgccgcgcccgccgcgcccgcctcgccgcccagcccgcagcgcagtcccccgcgcagccccgagccggggcgctatggcctcagcccggccggccgcggggaacgccaggcggcagacgagtcgcgcatccggcggcccatgaacgccttcatggtgtgggcaaaggacgagcgcaagcggctggctcagcagaacccggacctgcacaacgcggtgctcagcaagatgctgggcaaagcgtggaaggagctgaacgcggcggagaagcggcccttcgtggaggaagccgaacggctgcgcgtgcagcacttgcgcgaccaccccaactacaagtaccggccgcgccgcaagaagcaggcgcgcaaggcccggcggctggagcccggcctcctgctcccgggattagcgcccccgcagccaccgcccgagcctttccccgcggcgtctggctcggctcgcgccttccgcgagctgcccccgctgggcgccgagttcgacggcctggggctgcccacgcccgagcgctcgcctctggacggcctggagcccggcgaggctgccttcttcccaccgcccgcggcgcccgaggactgcgcgctgcggcccttccgcgcgccctacgcgcccaccgagttgtcgcgggaccccggcggttgctacggggctcccctggcggaggcgctcaggaccgcgccccccgcggcgccgctcgctggcctgtactacggcaccctgggcacgcccggcccgtaccccggcccgctgtcgccgccgcccgaggccccgccgctggagagcgccgagccgctggggcccgccgccgatctgtgggccgacgtggacctcaccgagttcgaccagtacctcaactgcagccggactcggcccgacgcccccgggctcccgtaccacgtggcactggccaaactgggcccgcgcgccatgtcctgcccagaggagagcagcctgatctccgcgctgtcggacgccagcagcgcggtctattacagcgcgtgcatctccggctaggccgccggcgccgcccgggtccctgcagcgcttcctcccgcagcccccgcgaccgatccgaccgcgtcgctgccgctctgctctctcatacgcgtgtatgtttggttccatgtcacagccccctaggagccagtgatgctcggccttgcgcccgttccacctcccaggccacccttcctgggcttctgggccacctgccctcggggggcccctgcgagggtgcctggagttcccacgtgtcccggggcttttccaggaagcccgagcccaggacctgttggcagagttgccagggttacatttttgaagcacctgctccttttcttgcagtgtattttctacaaccagattgtattaatattttttactttgcccttttaaaaaatatacctaatacaatatatttaatttttaattaaactcttaaacttttcttccaaaaaaaaaaaaaaa

SEQ ID NO: 313 - DNA, 2518 bp, Homo sapiens
ctattaacttgttcaaaaaagtatcaggagttgtcaaggcagagaagagagtgtttgcaaaagggggaaagtagtttgctgcctctttaagactaggactgagagaaagaagaggagagagaaagaaagggagagaagtttgagccccaggcttaagcctttccaaaaaataataataacaatcatcggcggcggcaggatcggccagaggaggagggaagcgctttttttgatcctgattccagtttgcctctctctttttttcccccaaattattcttcgcctgattttcctcgcggagccctgcgctcccgacacccccgcccgcctcccctcctcctctccccccgcccgcgggccccccaaagtcccggccgggccgagggtcggcggccgccggcgggccgggcccgcgcacagcgcccgcatgtacaacatgatggagacggagctgaagccgccgggcccgcagcaaacttcggggggcggcggcggcaactccaccgcggcggcggccggcggcaaccagaaaaacagcccggaccgcgtcaagcggcccatgaatgccttcatggtgtggtcccgcgggcagcggcgcaagatggcccaggagaaccccaagatgcacaactcggagatcagcaagcgcctgggcgccgagtggaaacttttgtcggagacggagaagcggccgttcatcgacgaggctaagcggctgcgagcgctgcacatgaaggagcacccggattataaataccggccccggcggaaaaccaagacgctcatgaagaaggataagtacacgctgcccggcgggctgctggcccccggcggcaatagcatggcgagcggggtcggggtgggcgccggcctgggcgcgggcgtgaaccagcgcatggacagttacgcgcacatgaacggctggagcaacggcagctacagcatgatgcaggaccagctgggctacccgcagcacccgggcctcaatgcgcacggcgcagcgcagatgcagcccatgcaccgctacgacgtgagcgccctgcagtacaactccatgaccagctcgcagacctacatgaacggctcgcccacctacagcatgtcctactcgcagcagggcacccctggcatggctcttggctccatgggttcggtggtcaagtccgaggccagctccagcccccctgtggttacctcttcctcccactccagggcgccctgccaggccggggacctccgggacatgatcagcatgtatctccccggcgccgaggtgccggaacccgccgcccccagcagacttcacatgtcccagcactaccagagcggcccggtgcccggcacggccattaacggcacactgcccctctcacacatgtgagggccggacagcgaactggaggggggagaaattttcaaagaaaaacgagggaaatgggaggggtgcaaaagaggagagtaagaaacagcatggagaaaacccggtacgctcaaaaagaaaaaggaaaaaaaaaaatcccatcacccacagcaaatgacagctgcaaaagagaacaccaatcccatccacactcacgcaaaaaccgcgatgccgacaagaaaacttttatgagagagatcctggacttctttttgggggactatttttgtacagagaaaacctggggagggtggggagggcgggggaatggaccttgtatagatctggaggaaagaaagctacgaaaaactttttaaaagttctagtggtacggtaggagctttgcaggaagtttgcaaaagtctttaccaataatatttagagctagtctccaagcgacgaaaaaaatgttttaatatttgcaagcaacttttgtacagtatttatcgagataaacatggcaatcaaaatgtccattgtttataagctgagaatttgccaatatttttcaaggagaggcttcttgctgaattttgattctgcagctgaaatttaggacagttgcaaacgtgaaaagaagaaaattattcaaatttggacattttaattgtttaaaaattgtacaaaaggaaaaaattagaataagtactggcgaaccatctctgtggtcttgtttaaaaagggcaaaagttttagactgtactaaattttataacttactgttaaaagcaaaaatggccatgcaggttgacaccgttggtaatttataatagcttttgttcgatcccaactttccattttgttcagataaaaaaaaccatgaaattactgtgtttgaaatattttcttatggtttgtaatatttctgtaaatttattgtgatattttaaggttttcccccctttattttccgtagttgtattttaaaagattcggctctgtattatttgaatcagtctgccgagaatccatgtatatatttgaactaatatcatccttataacaggtacattttcaacttaagtttttactccattatgcacagtttgagataaataaatttttgaaatatggacactgaaaaaaaaaaaaaaaaaa

SEQ ID NO: 314 - DNA, 2074 bp, Homo sapiens
atgcgacctgttcgagagaactcatcaggtgcgagaagcccgcgggttcctgctgatttggcgcggagcattttgataagcctacccttcccgccggactcgctggcccacaggcccccaagctccgctccgacggagtcccagggccttttcaccgtggccgctccagccccgggagcgccttctcctcccgccacgctggcgcaccttcttcccgccccggcaatgtacagccttctggagactgaactcaagaaccccgtagggacacccacacaagcggcgggcaccggcggccccgcagccccgggaggcgcaggcaagagtagtgcgaacgcagccggcggcgcgaactcgggcggcggcagcagcggtggtgcgagcggaggtggcgggggtacagaccaggaccgtgtgaaacggcccatgaacgccttcatggtatggtcccgcgggcagcggcgcaaaatggccctggagaaccccaagatgcacaattctgagatcagcaagcgcttgggcgccgactggaaactgctgaccgacgccgagaagcgaccattcatcgacgaggccaagcgacttcgcgccgtgcacatgaaggagtatccggactacaagtaccgaccgcgccgcaagaccaagacgctgctcaagaaagataagtactccctgcccagcggcctcctgcctcccggtgccgcggccgccgccgccgctgccgcggccgcagccgctgccgccagcagtccggtgggcgtgggccagcgcctggacacgtacacgcacgtgaacggctgggccaacggcgcgtactcgctggtgcaggagcagctgggctacgcgcagcccccgagcatgagcagcccgccgccgccgcccgcgctgccgccgatgcaccgctacgacatggccggcctgcagtacagcccaatgatgccgcccggcgctcagagctacatgaacgtcgctgccgcggccgccgccgcctcgggctacgggggcatggcgccctcagccacagcagccgcggccgccgcctacgggcagcagcccgccaccgccgcggccgcagctgcggccgcagccgccatgagcctgggccccatgggctcggtagtgaagtctgagcccagctcgccgccgcccgccatcgcatcgcactctcagcgcgcgtgcctcggcgacctgcgcgacatgatcagcatgtacctgccacccggcggggacgcggccgacgccgcctctccgctgcccggcggtcgcctgcacggcgtgcaccagcactaccagggcgccgggactgcagtcaacggaacggtgccgctgacccacatctgagcaccggcctgcgctcgtccacccttgttccccacccccacccccactcccgccccgcacccccaagttgggacgccttgtttagctttgcttgcctgggactgttgccttgtaccgatgatggggagggctgaaagttttgctgtagctgtcgggttttgtacaaaagcaaaaataagtcaggagcagcgaaaatgggacttctagagagctctcttgccccacgccgctgctcctttcacctttgtaggctgggaatcgctgtgttatttgcaaagaaaaaacagcccccactcctcctcctgagttccagggttattctgttacatttgaaaatgttgtcttgttagtttgcagttagccaaggagtgaatgggagaaacatagtatcgggtgaggccagctggagaactgcaacgcctacgcccccagtcgtgtcgcgtctgttttcctcgtggttttttggggcgctgaccgctccaagcagcgcggcagctaaagccaatgttaatttatagccaggtgtgcgtgtgtctcccgcctcgccgcccctggccgcgggacagcttctgtccaatcatgttgagttggtgatttctgccgtgatctgtttgatatttcttcgcgctaatgtgttcagatttcgtttgggtagtggggaggggctactttgtttcagggttttcaagcttttactcttaattcctaaatgagatcaataaattttataacc

SEQ ID NO: 315 - DNA, 4912 bp, Homo sapiens
attggggtctgctctaagctgcagcaagagaaactgtgtgtgaggggaagaggcctgtttcgctgtcgggtctctagttcttgcacgctctttaagagtctgcactggaggaactcctgccattaccagctcccttcttgcagaagggagggggaaacatacatttattcatgccagtctgttgcatgcaggctttttggcttcctaccttgcaacaaaataattgcaccaactccttagtgccgattccgcccacagagagtcctggagccacagtcttttttgctttgcattgtaggagagggactaagtgctagagactatgtcgctttcctgagctaccgagagcgctcgtgaactggaatcaactgcttcagggaaaaagaaaaaaaaaaaaaaaagacttgcctgggaggccgcgagaaacttgcattggaagcttcagcaaccagcattcgagaaactcctctctactttagcacggtctccagactcagccgagagacagcaaactgcagcgcggtgagagagcgagagagagggagagagagactctccagcctgggaactataactcctctgcgagaggcggagaactccttccccaaatcttttggggacttttctctctttacccacctccgcccctgcgaggagttgaggggccagttcggccgccgcgcgcgtcttcccgttcggcgtgtgcttggcccggggaaccgggagggcccggcgatcgcgcggcggccgccgcgagggtgtgagcgcgcgtgggcgcccgccgagccgaggccatggtgcagcaaaccaacaatgccgagaacacggaagcgctgctggccggcgagagctcggactcgggcgccggcctcgagctgggaatcgcctcctcccccacgcccggctccaccgcctccacgggcggcaaggccgacgacccgagctggtgcaagaccccgagtgggcacatcaagcgacccatgaacgccttcatggtgtggtcgcagatcgagcggcgcaagatcatggagcagtcgcccgacatgcacaacgccgagatctccaagcggctgggcaaacgctggaagctgctcaaagacagcgacaagatccctttcattcgagaggcggagcggctgcgcctcaagcacatggctgactaccccgactacaagtaccggcccaggaagaaggtgaagtccggcaacgccaactccagctcctcggccgccgcctcctccaagccgggggagaagggagacaaggtcggtggcagtggcgggggcggccatgggggcggcggcggcggcgggagcagcaacgcggggggaggaggcggcggtgcgagtggcggcggcgccaactccaaaccggcgcagaaaaagagctgcggctccaaagtggcgggcggcgcgggcggtggggttagcaaaccgcacgccaagctcatcctggcaggcggcggcggcggcgggaaagcagcggctgccgccgccgcctccttcgccgccgaacaggcgggggccgccgccctgctgcccctgggcgccgccgccgaccaccactcgctgtacaaggcgcggactcccagcgcctcggcctccgcctcctcggcagcctcggcctccgcagcgctcgcggccccgggcaagcacctggcggagaagaaggtgaagcgcgtctacctgttcggcggcctgggcacgtcgtcgtcgcccgtgggcggcgtgggcgcgggagccgaccccagcgaccccctgggcctgtacgaggaggagggcgcgggctgctcgcccgacgcgcccagcctgagcggccgcagcagcgccgcctcgtcccccgccgccggccgctcgcccgccgaccaccgcggctacgccagcctgcgcgccgcctcgcccgccccgtccagcgcgccctcgcacgcgtcctcctcggcctcgtcccactcctcctcttcctcctcctcgggctcctcgtcctccgacgacgagttcgaagacgacctgctcgacctgaaccccagctcaaactttgagagcatgtccctgggcagcttcagttcgtcgtcggcgctcgaccgggacctggattttaacttcgagcccggctccggctcgcacttcgagttcccggactactgcacgcccgaggtgagcgagatgatctcgggagactggctcgagtccagcatctccaacctggttttcacctactgaagggcgcgcaggcagggagaagggccggggggggtaggagaggagaaaaaaaaagtgaaaaaaagaaacgaaaaggacagacgaagagtttaaagagaaaagggaaaaaagaaagaaaaagtaagcagggctggcttcgcccgcgttctcgtcgtcggatcaaggagcgcggcggcgttttggacccgcgctcccatcccccaccttcccgggccggggacccactctgcccagccggagggacgcggaggaggaagagggtagacaggggcgacctgtgattgttgttattgatgttgttgttgatggcaaaaaaaaaaaagcgacttcgagtttgctcccctttgcttgaagagaccccctcccccttccaacgagcttccggacttgtctgcacccccagcaagaaggcgagttagttttctagagacttgaaggagtctcccccttcctgcatcaccaccttggttttgttttattttgcttcttggtcaagaaaggaggggagaacccagcgcacccctccccccctttttttaaacgcgtgatgaagacagaaggctccggggtgacgaatttggccgatggcagatgttttgggggaacgccgggactgagagactccacgcaggcgaattcccgtttggggcttttttttcctccctcttttccccttgccccctctgcagccggaggaggagatgttgaggggaggaggccagccagtgtgaccggcgctaggaaatgacccgagaaccccgttggaagcgcagcagcgggagctaggggcgggggcggaggaggacacgaactggaagggggttcacggtcaaactgaaatggatttgcacgttggggagctggcggcggcggctgctgggcctccgccttcttttctacgtgaaatcagtgaggtgagacttcccagaccccggaggcgtggaggagaggagactgtttgatgtggtacaggggcagtcagtggagggcgagtggtttcggaaaaaaaaaaagaaaaaaagaaaaaaaaagaaaaaaaaaagatttttttcttctcttaatcggaatcgtgatggtgttggattatttcaatggtggggttaatatagcatgttatcctgtctatcttttaaagatttctgtataagactgttgagcagtttttaaaatagtgtaggataatataaaaagcagatagatggcgctatgtttgattcctacaacgaaattatcaccagctttttttcattcttaactctttaaaggattcaaacgcaactcaaatctgtgctggactttaaaaaaacaattcaggaccaaattttttctcagtgtgtgtgtttattccttataggtgtaaatgagaagacgtgtttttttccttcaccgatgctccatcctcgtatttctttttccttgtaaatgtaatcagatgccattttatatgtggacgtatttatactggccaaacatattttttcttttgtccctttttttctttcctttctttttacttcctttatttctttattccttccttttcctttttttcttttttttttctttttttttttttttttttggtagttgttgttacccacgccattttacgtctccttcactgaagggctagagttttaacttttaattttttatatttaaatgtagacttttgacacttttaaaaaacaaaaaaagacaagagagatgaaaacgtttgattattttctcagtgtatttttgtaaaaaatatataaagggggtgttaatcggtgtaaatcgctgtttggatttcctgattttataacagggcggctggttaatatctcacacagtttaaaaaatcagcccctaatttctccatgtttacacttcaatctgcaggcttcttaaagtgacagtatcccttaacctgccaccagtgtccaccctccggcccccgtcttgtaaaaaggggaggagaattagccaaacactgtaagcttttaagaaaaacaaagttttaaacgaaatactgctctgtccagaggctttaaaactggtgcaattacagcaaaaagggattctgtagctttaacttgtaaaccacatcttttttgcactttttttataagcaaaaacgtgccgtttaaaccactggatctatctaaatgccgatttgagttcgcgacactatgtactgcgtttttcattcttgtatttgactatttaatcctttctacttgtcgctaaatataattgttttagtcttatggcatgatgatagcatatgtgttcaggtttatagctgttgtgtttaaaaattgaaaaaagtggaaaacatctttgtacatttaagtctgtattataataagcaaaaagattgtgtgtatgtatgtttaatataacatgacaggcactaggacgtctgcctttttaaggcagttccgttaagggtttttgtttttaaacttttttttgccatccatcctgtgcaatatgccgtgtagaatatttgtcttaaaattcaaggccacaaaaacaatgtttgggggaaaaaaaagaaaaaatcatgccagctaatcatgtcaagttcactgcctgtcagattgttgatatataccttctgtaaataactttttttgagaaggaaataaaatcagctggaactgaaccctaaaaaaaaaaaaaaaaaaaaaaaaaaaaaaaaaaaa

SEQ ID NO: 316 - DNA, 4563 bp, Homo sapiens
gtgaaaaaggcgagccaccaaaacccatctccagtctcctcccgggggcccccagcccgcctctgtgccactttgcatcccacgccggaggaggcattaacgagaccgggtaaggctttttaaacggtccaaggtgtagagccatacttcaggaggatcctcagaagttttggacaagcctccccaaatgtggcaggtgctgtgctggccattggtgacccaaagatgatgaaaaatatgttcctgcccacaaggagttagcgacctactgggctttcctcttgctgatgacatgattcctgtttgaatctgttgacaagattctgaaagctgaacagagaattctggcactgcactgggtaggaaaaaggatgtcttccaagcgaccagcctctccgtatggggaagcagatggagaggtagccatggtgacaagcagacagaaagtggaagaagaggagagtgacgggctcccagcctttcaccttcccttgcatgtgagttttcccaacaagcctcactctgaggaatttcagccagtttctctgctgacgcaagagacttgtggccataggactcccacttctcagcacaatacaatggaagttgatggcaataaagttatgtcttcatttgccccacacaactcatctacctcacctcagaaggcagaagaaggtgggcgacagagtggcgagtccttgtctagtacagccctgggaactcctgaacggcgcaagggcagtttagctgatgttgttgacaccttgaagcagaggaaaatggaagagctcatcaaaaacgagccggaagaaacccccagtattgaaaaactactctcaaaggactggaaagacaagcttcttgcaatgggatcggggaactttggcgaaataaaagggactcccgagagcttagctgagaaagaaaggcaactcatgggtatgatcaaccagctgaccagcctccgagagcagctgttggctgcccacgatgagcagaagaaactagctgcctctcagattgagaaacagcgtcagcaaatggagctggccaagcagcaacaagaacaaattgcaagacagcagcagcagcttctacagcaacaacacaaaatcaatttgctccagcaacagatccaggttcaaggtcagctgccgccattaatgattcccgtattccctcctgatcaacggacactggctgcagctgcccagcaaggattcctcctccctccaggcttcagctataaggctggatgtagtgacccttaccctgttcagctgatcccaactaccatggcagctgctgccgcagcaacaccaggcttaggcccactccaactgcagcagttatatgctgcccagctagctgcaatgcaggtatctccaggagggaagctgccaggcataccccaaggcaaccttggtgctgctgtatctcctaccagcattcacacagacaagagcacaaacagcccaccacccaaaagcaaggatgaagtggcacagccactgaacctatcagctaaacccaagacctctgatggcaaatcacccacatcacccacctctccccatatgccagctctgagaataaacagtggggcaggccccctcaaagcctctgtcccagcagcgttagctagtccttcagccagagttagcacaataggttacttaaatgaccatgatgctgtcaccaaggcaatccaagaagctcggcaaatgaaggagcaactccgacgggaacaacaggtgcttgatgggaaggtggctgttgtgaatagtctgggtctcaataactgccgaacagaaaaggaaaaaacaacactggagagtctgactcagcaactggcagttaaacagaatgaagaaggaaaatttagccatgcaatgatggatttcaatctgagtggagattctgatggaagtgctggagtctcagagtcaagaatttatagggaatcccgagggcgtggtagcaatgaaccccacataaagcgtccaatgaatgccttcatggtgtgggctaaagatgaacggagaaagatccttcaagcctttcctgacatgcacaactccaacatcagcaagatattgggatctcgctggaaagctatgacaaacctagagaaacagccatattatgaggagcaagcccgtctcagcaagcagcacctggagaagtaccctgactataagtacaagcccaggccaaagcgcacctgcctggtggatggcaaaaagctgcgcattggtgaatacaaggcaatcatgcgcaacaggcggcaggaaatgcggcagtacttcaatgttgggcaacaagcacagatccccattgccactgctggtgttgtgtaccctggagccatcgccatggctgggatgccctcccctcacctgccctcggagcactcaagcgtgtctagcagcccagagcctgggatgcctgttatccagagcacttacggtgtgaaaggagaggagccacatatcaaagaagagatacaggccgaggacatcaatggagaaatttatgatgagtacgacgaggaagaggatgatccagatgtagattatgggagtgacagtgaaaaccatattgcaggacaagccaactgataagggtcaaaagattgttgtgaccttaggacttaaagaagccctaactggttcatccttaccagtggccaagcacattaactttctcatacactgactgttactttaactgttagtcttaaatagttgggacatcagctgactaatagacctcagcctcaaaaggcttggaaagaaaaaacaaatacaacaagcaaacaacaatatcaacaacaagagattgaaataagctatgggtaaaataatgccagtaattcagctgctacatccaagcactgaagtcttacccgtcaacttttttttttttttaaataaactttatggctgtttgttctacaatgttctagaaattctcactcaggtacacagtgccaacaagtggcttgtgaatgtgttttgttgttttgtgctacaatttttaaaaagaaaaaagttttgttttgttttttggggtttctgggttttttccttttctttttctttcctttcattttttttctttgtaatgcacctgacagaaaaaaaagaaaaatgaatttctctttacttctctccaccttctccatctctctactttaaagatggaagtctgtgcatgaggggaaagagggaaaaagagcctgtttttaacttccttgctatccaccacaaaataagcaattattttctttagaggactttatctattgcacaccacactacatctttgagcaagtgccaaatttgtactgaagtgttgaccaagttcattttttctctttactttttccttttccttcttaagttaggacagtgttaaatcttagacaatcccttgaaaaacctgaaataccagcagctggtgagatttgacttttttttttaatggaaactgtaggtgctgttctcaggtgaaaagagagagagagagagagacataagaaatttagagaaaaatattttctgatcttggatttttgtgtgtatgtatgtatgtgattatggtactaataataggaataacgttggaccattgtgagttaaacccacatctggggatgaaatcccacatcctcccaagtgactggtctagaaataatcttgaccttgactttgcacttcaaatgacaacttaaccaagtatagggctcagaaattatatttttaaatgtctgattattattggatggatcaggtggccctgtgtaatagaggtgtgcatgtataacatggaagctactagcaaactgctcccagatgtcctttctccctggtcagttggttccattaacgtttgctacttagtgatttttgtttttcctgttgatattttgagcaaaacaatcattgttttcattgaatatatttggccattttttcagacaaatagaattagcttatttcttcaacattccatcctttcccgatcaggaaatgaaactgatgattttataaggtatttttcacccctccatgaagtgaggtggaggcctttagcatttcagaagtgtgggccatatgtagttcatgccataaaaagtaggatttaattaaaagtcattgcagcccaataaaatggagcctggctgcacccagggatccttgccactgctcttcccttgctgtcagattaatccactgaagtccaactttggttcaagcagagtatttgcaaagagcaacaactgaatgtgatgggactgcttatgtagattttgccagccaaatgccaaggcagttgtagggcctgtacaaataaatgcaaaatcatttcaagtcaattgccattatttgtattgaagtatcagatagatagtaaatactgcaactagtagcttgatgtgctatagttttcactccagtcatcattttcctatctcaccccccgaaacaccaccctaaagttggatttttacatataaataaaaaaagaatcccttttaaaaaaaaaaaaaaaaaa

SEQ ID NO: 317 - DNA, 5048 bp, Homo sapiens
aaaggcaatttaccagtgatttctgggtgctggggctgatattttttgtgcatatttaagaatgtcttccaagcaagccacctctccatttgcctgtgcagctgatggagaggatgcaatgacccaggatttaacctcaagggaaaaggaagagggcagtgatcaacatgtggcctcccatctgcctctgcaccccataatgcacaacaaacctcactctgaggagctaccaacacttgtcagtaccattcaacaagatgctgactgggacagcgttctgtcatctcagcaaagaatggaatcagagaataataagttatgttccctatattccttccgaaatacctctacctcaccacataagcctgacgaagggagtcgggaccgtgagataatgaccagtgttacttttggaaccccagagcgccgcaaagggagtcttgccgatgtggtggacacactgaaacagaagaagcttgaggaaatgactcggactgaacaagaggattcctcctgcatggaaaaactactttcaaaagattggaaggaaaaaatggaaagactaaataccagtgaacttcttggagaaattaaaggtacacctgagagcctggcagaaaaagaacggcagctctccaccatgattacccagctgatcagtttacgggagcagctactggcagcgcatgatgaacagaaaaaactggcagcgtcacaaattgagaaacaacggcagcaaatggaccttgctcgccaacagcaagaacagattgcgagacaacagcagcaacttctgcaacagcagcacaaaattaatctcctgcagcaacagatccaggttcagggtcacatgcctccgctcatgatcccaatttttccacatgaccagcggactctggcagcagctgctgctgcccaacagggattcctcttcccccctggaataacatacaaaccaggtgataactaccccgtacagttcattccatcaacaatggcagctgctgctgcttctggactcagccctttacagctccagaagggtcatgtctcccacccacaaattaaccaaaggctaaagggcctaagtgaccgttttggcaggaatttggacacctttgaacatggtggtggccactcttacaaccacaaacagattgagcagctctatgccgctcagctggccagcatgcaggtgtcacctggagcaaagatgccatcaactccacagccaccaaacacagcagggacggtctcacctactgggataaaaaatgaaaagagagggaccagccctgtaactcaagttaaggatgaagcagcagcacagcctctgaatctctcatcccgacccaagacagcagagcctgtaaagtccccaacgtctcccacccagaacctcttcccagccagcaaaaccagccctgtcaatctgccaaacaaaagcagcatccctagccccattggaggaagcctgggaagaggatcctctttagatatcctatctagtctcaactcccctgccctttttggggatcaggatacagtgatgaaagccattcaggaggcgcggaagatgcgagagcagatccagcgggagcaacagcagcaacagccacatggtgttgacgggaaactgtcctccataaataatatggggctgaacagctgcaggaatgaaaaggaaagaacgcgctttgagaatttggggccccagttaacgggaaagtcaaatgaagatggaaaactgggcccaggtgtcatcgaccttactcggccagaagatgcagagggaggtgccactgtggctgaagcacgagtctacagggacgcccgcggccgtgccagcagcgagccacacattaagcgaccaatgaatgcattcatggtttgggcaaaggatgagaggagaaaaatccttcaggccttccccgacatgcataactccaacattagcaaaatcttaggatctcgctggaaatcaatgtccaaccaggagaagcaaccttattatgaagagcaggcccggctaagcaagatccacttagagaagtacccaaactataaatacaaaccccgaccgaaacgcacctgcattgttgatggcaaaaagcttcggattggggagtataagcaactgatgaggtctcggagacaggagatgaggcagttctttactgtggggcaacagcctcagattccaatcaccacaggaacaggtgttgtgtatcctggtgctatcactatggcaactaccacaccatcgcctcagatgacatctgactgctctagcacctcggccagcccggagcccagcctcccggtcatccagagcacttatggtatgaagacagatggcggaagcctagctggaaatgaaatgatcaatggagaggatgaaatggaaatgtatgatgactatgaagatgaccccaaatcagactatagcagtgaaaatgaagccccggaggctgtcagtgccaactgaggagtttttgtttgctgaattaaagtactctgacatttcacccccctccccaacaaagagttattaaagagcccgcatgcatttgtggctccacaattacatcagcagaatggtcttaattgtttcgtaaagtgtgagacagattaagttttccctgatttttcatgaacttgagttttttgttgttattgttattgttgttgttgttgtttttttaatttaggtgaagacatattaaatatgagacaccaggacttgaaacttatctcaacccgtagatgtcttacaagtcttatatttttgtcttactttttttttcttttggatgttgataaaggtttaagttactgttttagatggggttaaacattctcactcaggtatgctgtgccggcctacaggttgtgaatgtgtttttattctgaattattttagaaaacaactgaggatttcatattgtgaaacagaacaagtccacggcgtgtgcagctgcatgtagagcatattcaaaaggcctcggaattccaattttccatttgtagagttaaactttgaatgtgccaaactttttcgtaacttttgaatcttaatattttgaaagtcttaaaggagacactgcaaagtcttagacaatctttggcatcttaaaataaaatagcaaaccaacatttttttttccagaaaatggtaaggtactcaggaatctggagacaagatattgtaaggaatgaacaaggttgccacagtgcatggacccaattgtgtttgcctgttgacgtgccatcagtgcgtgatgtggtatgacatacacacaccagagcaaccgccacaccagatatcgacagagtggtcttctctgcctgagaccacctctcactacatccattatccctttgcctttaaccctgacattcagtcttaacacattttatcttaaataatttattcattccagaatgtcaagggtccacttgctatttattttttttcaattgttggtggcattaatttaataattcttgtttttcaccttccttccccgaagaacttttccgtccttttcacctccttctcctgtgtacatagtgattttatgtccccagaacgcctggaagcatttctgaaaccaagatattattaaaaacctattattgtttttaatcatgagtatgtatctggctgcagggctgtgtattgggatataggtatatagtcttacacttaaacaggtatgcccctgaggttcactgtgacctcaagtcttttgccagaattttcccctaattcagttcacaagtggtagggtctgcatcagtggcatttccccctgaattccattcagcagcaaggttcaacagtggtgactgccaggcaggagagtcctgcggccaaacctgaagcccaaggctcgtgggccatgcaggaatctcagtgaagctgtcatgggctggcacctttacactgagttgccttgtcccagctggcacatctagggagttcattgcaaaatccccaggatgcaaaaagccacatgacagcctcagagcaaagatggtggcaaatagtcatgatacatctagagaatgaaagaaaactgtaagggaggagaaggaggggaatacattccctatatgggatgttcctactgttaactctggggaacagatagctccgggggcagcagatgagttcctctggctgactctatctgtagccacatggggacctgcctacgtgtgaacaaaatgaactgcacttatcacacaaggatttctttgaagacatgctactggggtgggaagcagtgaggttttattccccatctcctaactacagggagctctgccatgtcattttggccttcctgaaactaggacaggttgtctatcggggggcttcccccagagaggtttagtgggagaatgtcagtgaatgggatagttcacctcatgggacaacccagaatctgatcaccaggacataggaatggccccatcagatttcttgagccattttgtcacttggaagaaaatagtgtacctttgtatttatttaagagtgctcaaggcctaatagcaataaacaggtctagccaagaaattacaagctattctgttagctgggagtgctctctataagctgattaaggtactgataggaactctttgttattcatgttggttggggattagaaatttgtttttgtacatttatttcaaatgaggaggaggtcattttttctctcaaaaaatgagtatttattattgtcttactgatttctttgattatatacctctcctcctcagttcactcttgttttttttctttctctttggcttttgcttttgctctctctcacttctttcttattttgttgcattggtagagtgttgtatggctagcattgtattgtatgtaattaattttgcacaaaagcaaacatttagcatagtaggttaattttgtttgtttttatgaccatgccaaaataatattctgggctggtggagaacaaaggactgttctttaggactgaaacttgattttgctcatagtaagt

SEQ ID NO: 318 - DNA, 3219 bp, Homo sapiens
aagttggacgccccgacccgtgcgagggccaggtccgcgcctgccccgccaggcgaagcgaggcgacccgcgtgcggccatggcttcgctgctgggagcctacccttggcccgagggtctcgagtgcccggccctggacgccgagctgtcggatggacaatcgccgccggccgtcccccggcccccgggggacaagggctccgagagccgtatccggcggcccatgaacgccttcatggtttgggccaaggacgagaggaaacggctggcagtgcagaacccggacctgcacaacgccgagctcagcaagatgctgggaaagtcgtggaaggcgctgacgctgtcccagaagaggccgtacgtggacgaggcggagcggctgcgcctgcagcacatgcaggactaccccaactacaagtaccggccgcgcaggaagaagcaggccaagcggctgtgcaagcgcgtggacccgggcttccttctgagctccctctcccgggaccagaacgccctgccggagaagagaagcggcagccggggggcgctgggggagaaggaggacaggggtgagtactcccccggcactgccctgcccagcctccggggctgctaccacgaggggccggctggtggtggcggcggcggcaccccgagcagtgtggacacgtacccgtacgggctgcccacacctcctgaaatgtctcccctggacgtgctggagccggagcagaccttcttctcctccccctgccaggaggagcatggccatccccgccgcatcccccacctgccagggcacccgtactcaccggagtacgccccaagccctctccactgtagccaccccctgggctccctggcccttggccagtcccccggcgtctccatgatgtcccctgtacccggctgtcccccatctcctgcctattactccccggccacctaccacccactccactccaacctccaagcccacctgggccagctttccccgcctcctgagcaccctggcttcgacgccctggatcaactgagccaggtggaactcctgggggacatggatcgcaatgaattcgaccagtatttgaacactcctggccacccagactccgccacaggggccatggccctcagtgggcatgttccggtctcccaggtgacaccaacgggtcccacagagaccagcctcatctccgtcctggctgatgccacggccacgtactacaacagctacagtgtgtcatagagctggaggcgccccgtccggtcagccctcgcgccctctccttcttgtgccttgagtggcagaggagccgtccagccacaccagctttcctcccaccgctcagggcagggaggtctgaactgcggccccagagcctttggcctaagctggactctccttatccgagtgccgcctctatccccttccccacgttccagcccctgcagcccacattttaagtatattccttcaagtgagttttcctccagcccctgagagttgctgtctcccagtggaatgttcactgacgtcttttcttggtagccatcatcgaaactaatggggggacagacttgatagccaaggtcccttctggtccagttttctgatttagggttctctcaagattaataaaggaagatggggaaatttgactcattaatgagctcgctaacctacgatctggtgataattttgtgtgcacagcccaaggaccacgaggctttctgcactttctgcacccccttccaaagtgaccacaaaatttcaaagggactcatacaatttgagaaaaaacagtcaacctgatttgagaaattaaccagtatggctaactatatcacagaaaatgggattgagttaaaactattttattttaaatatacattttaaagcagttctttttttttgttaatttgtttattatacacacacttcaagagaatatgcacagtctaggccgggcacggtggctcacgcctgtaatcccagcactttgggaggccgaggcatgtggatcacctgaggtcaggagtttgagaccagcctagacaacatggtgaaaccttgtctctatgaaaaatacaaaatttgctgggagtggtggtgcatgcctgtaatcccagctacttggaaggctgaggcaggagaatgtcttgaacctaggaggtggaggttgcagtgagctgagattgcaccattgcactccagcctgtgcaacaagagtgaaactccatttcaagaaaaaaaaaaaaaaaagaatatgcacagtctgaatgtataccaggagtgtgagagacacatgcccacttcatgcaactcctaaactcaaagtctaaatcagatatttttattaacaatgacaacttgttgccaactccctgtttctaatgaccaaagacccagggtacctaaaaggactttgcaaccaagcaaagtcactgtcttcaaatctggatacacactttcccctctgtagattcaaaaggtgcttccttcccggctgtctccagcttccttactctcttttctgggatttctttttctcttctttctgctcttcctccactgctgaactggtccctaactgaaacagcccctgacttatcccaagcatgcttcctttagctgctgtgagaatttgtcttcctcaccagccaggtcctcaggcaaagtcctcagccagtgctttagagcaacttcccgcaaatcagaaactcactgtgattccaaaaatgtttctgagccctggacccctgcccccaaaatattttcatctttcccccaaacctcctttaaaggagcatgcataacagtgtgctgaaagacagttgttggttttttgattttagcatattatttcctgtatgaaatatgttttatataatctcctattatttttatcttatgttttgtattgttgataaatcctttttgtccttctaagatgtcctattgtaaaatcacttataaggtatgattactctttatgctattactttatatgccatttggtaataaatagtaaattgttgatgatatgattgactgatgcgcagtccagagcatgtatgaataatctcataaaacagtatcacagacattaagctaaactgtttcgtttttttgaaagaacaactcatactttggaacagttgtcaatattaatttgttgcaaatatttaatttaaataaacatttttgtaccatgaaaa

SEQ ID NO: 319 - DNA, 3069 bp, Homo sapiens
ggcgagggtcggggccaccgcgcggcgacctcgggtcccggagcgaccgcagggcagccccgggcgccggccccggtgcgcgtctcctgtgcgcgcccctccgcgcgcggccccgatgctggacatgagcgaggcccgctcccagccgccctgcagcccgtccggcaccgccagctccatgtcgcacgtggaggactcggactcggacgcgccgccgtctcccgccggctccgagggcctgggccgcgcgggggtcgcggtggggggcgcccggggcgacccggcggaggcggcggacgagcgcttcccggcctgcatccgcgacgccgtgtcgcaggtgctcaagggctacgactggagtctggtgcccatgccggtgcgcggcggcggcggcggcgcgctcaaagccaagccgcatgtgaagcggcccatgaacgcattcatggtgtgggcgcaggcggcgcgccgcaagctggccgaccagtacccgcacctgcacaacgccgagctcagcaagacgctgggcaagctgtggcgcttgctgagcgagagcgagaagcggcccttcgtggaggaggcagagcgccttcgcgtgcagcacaagaaggaccaccccgactacaagtaccagccacggcgcaggaagagcgccaaagccggccacagcgactccgactcgggcgcggagctgggaccccaccctggcggcggtgccgtgtacaaggctgaagcagggcttggagatgggcaccaccatggcgaccacacagggcagacccacgggccgcccaccccgcccaccacccccaagacggagctgcagcaggcgggcgccaagccggagctgaagctggagggacgccggccggtggacagcgggcgccagaacatcgacttcagcaacgtggacatctcggagctcagcagcgaggtcatgggcaccatggacgccttcgacgtccacgagttcgaccagtacctgcccctgggcggccccgccccacccgagccgggccaggcctatgggggcgcctacttccacgccggggcgtcccccgtgtgggcccacaagagtgccccgtcggcctccgcgtcgcccaccgagacgggtcccccacggccgcacatcaagacggagcagccgagccccggccactacggcgaccagccccgaggctcgcccgactacggttcctgcagcggccagtccagcgccaccccggccgcccccgccggccccttcgccggctcacagggcgactatggcgacctgcaggcctccagctactatggtgcctaccctggctacgcacccggcctctaccagtacccctgcttccactcgccgcgccggccctacgcctcacccctgctcaacggcctggccctgccgcccgcccacagccccaccagtcactgggaccagccggtgtacaccaccctgaccaggccctgagggcccagccgcggggagggactcgcaggcgtcagggggcagccttgtcccggcccagtgtgtgtgaccagggcgggaggggccccagtggctgagctccaagtgcctgctgaagtctgcagggaaacacgcttgctgcccgtggccctcggcctccagatggccacacctctgccgacgacggaccagctccctctcccttctatctttctttttgaggtggtgggattattccacaaagaagggctgccgtttggtccctcttccgtgaggactggcggcaccagcaccttcgctttgcatctcggtagaggagaaacggcagcacagcccaaggaccaaaggagggggtggcaggggccttgcagggcgctgtgaggtccaggccggtcttggcgccgagagcccctgcactcaaggccacattccctcgacaacggctgcacgggctgtccgggatccggggtgtctgtccgcagactgggatgagtctactcgagcatctccgggacctgcctgtcagatctgaggtgtctccttgctggcagagtgcgctcacgcgagggctggctgtgatgaacacatctctcttttatttttatgtttttgataatttttatttttgaagcttaaatgtgtttcttctgaaagctgttaaagatgtatttatgttctgtgttattttatctttaattaatgaggtaattcgggcaaagagtagaatttaagacaaaacggaagctgggaagcttcccttgagggcaggcaggaggtggagttgcagctgttggccggcatcacgttgctcgttgctcggcttatgggaggccgccctggagggcccggaggtcccaaggtccctgggaggactgggcccctcatgcctcgagcttggcaaccgaaaacccgagggaggagaagggacctgccttgtgacatctctgatcaggttggggtgccccagcacccagtaccagtttggggtttgggaagcaggactccgtccctgtccccgactgtgccacgtggtaggacacataggacacaggaattcctgggtccttgcccatgactgtgccatgtggtaggacacaggacacaggaattcctggaaagtggtggcttcagaagtgatcttggctcgcaggcaccagtgccacctaccaagctgtgaaactaaaccttctccactaaacgtcgttagggcctcagttctagacgagtcatacctgattcacctgcactgcttcccctgtgtgctgagcatagagcatacaatagcgcctacttcacggaaacttgtgcctttaaactttgtaaacttaaacacagccgagaagttgcttctttgtactttttctacttttcctacttttttgtagaaaaaaaagataatgcctctgcttctatttctctgggggtgggggtgggggccgggagccgtcgcagacccgtttcatgcagcgtctcccttggcaccgcgttcggaggacgcaccctcactcccctgctgccttcactcctttctgaccaagcaacgctaacttttgtacagatcgatttgataaaattaaacaaagtgctttttatggaaaaaaaaaaaaaaaaaaaaa

SEQ ID NO: 320 - DNA, 3935 bp, Homo sapiens
ggagagccgaaagcggagctcgaaactgactggaaacttcagtggcgcggagactcgccagtttcaaccccggaaacttttctttgcaggaggagaagagaaggggtgcaagcgcccccacttttgctctttttcctcccctcctcctcctctccaattcgcctccccccacttggagcgggcagctgtgaactggccaccccgcgccttcctaagtgctcgccgcggtagccggccgacgcgccagcttccccgggagccgcttgctccgcatccgggcagccgaggggagaggagcccgcgcctcgagtccccgagccgccgcggcttctcgcctttcccggccaccagccccctgccccgggcccgcgtatgaatctcctggaccccttcatgaagatgaccgacgagcaggagaagggcctgtccggcgcccccagccccaccatgtccgaggactccgcgggctcgccctgcccgtcgggctccggctcggacaccgagaacacgcggccccaggagaacacgttccccaagggcgagcccgatctgaagaaggagagcgaggaggacaagttccccgtgtgcatccgcgaggcggtcagccaggtgctcaaaggctacgactggacgctggtgcccatgccggtgcgcgtcaacggctccagcaagaacaagccgcacgtcaagcggcccatgaacgccttcatggtgtgggcgcaggcggcgcgcaggaagctcgcggaccagtacccgcacttgcacaacgccgagctcagcaagacgctgggcaagctctggagacttctgaacgagagcgagaagcggcccttcgtggaggaggcggagcggctgcgcgtgcagcacaagaaggaccacccggattacaagtaccagccgcggcggaggaagtcggtgaagaacgggcaggcggaggcagaggaggccacggagcagacgcacatctcccccaacgccatcttcaaggcgctgcaggccgactcgccacactcctcctccggcatgagcgaggtgcactcccccggcgagcactcggggcaatcccagggcccaccgaccccacccaccacccccaaaaccgacgtgcagccgggcaaggctgacctgaagcgagaggggcgccccttgccagaggggggcagacagccccctatcgacttccgcgacgtggacatcggcgagctgagcagcgacgtcatctccaacatcgagaccttcgatgtcaacgagtttgaccagtacctgccgcccaacggccacccgggggtgccggccacgcacggccaggtcacctacacgggcagctacggcatcagcagcaccgcggccaccccggcgagcgcgggccacgtgtggatgtccaagcagcaggcgccgccgccacccccgcagcagcccccacaggccccgccggccccgcaggcgcccccgcagccgcaggcggcgcccccacagcagccggcggcacccccgcagcagccacaggcgcacacgctgaccacgctgagcagcgagccgggccagtcccagcgaacgcacatcaagacggagcagctgagccccagccactacagcgagcagcagcagcactcgccccaacagatcgcctacagccccttcaacctcccacactacagcccctcctacccgcccatcacccgctcacagtacgactacaccgaccaccagaactccagctcctactacagccacgcggcaggccagggcaccggcctctactccaccttcacctacatgaaccccgctcagcgccccatgtacacccccatcgccgacacctctggggtcccttccatcccgcagacccacagcccccagcactgggaacaacccgtctacacacagctcactcgaccttgaggaggcctcccacgaagggcgaagatggccgagatgatcctaaaaataaccgaagaaagagaggaccaaccagaattccctttggacatttgtgtttttttgtttttttattttgttttgttttttcttcttcttcttcttccttaaagacatttaagctaaaggcaactcgtacccaaatttccaagacacaaacatgacctatccaagcgcattacccacttgtggccaatcagtggccaggccaaccttggctaaatggagcagcgaaatcaacgagaaactggactttttaaaccctcttcagagcaagcgtggaggatgatggagaatcgtgtgatcagtgtgctaaatctctctgcctgtttggactttgtaattatttttttagcagtaattaaagaaaaaagtcctctgtgaggaatattctctattttaaatatttttagtatgtactgtgtatgattcattaccattttgaggggatttatacatatttttagataaaattaaatgctcttatttttccaacagctaaactactcttagttgaacagtgtgccctagcttttcttgcaaccagagtatttttgtacagatttgctttctcttacaaaaagaaaaaaaaaatcctgttgtattaacatttaaaaacagaattgtgttatgtgatcagttttgggggttaactttgcttaattcctcaggctttgcgatttaaggaggagctgccttaaaaaaaaataaaggccttattttgcaattatgggagtaaacaatagtctagagaagcatttggtaagctttatcatatatatattttttaaagaagagaaaaacaccttgagccttaaaacggtgctgctgggaaacatttgcactcttttagtgcatttcctcctgcctttgcttgttcactgcagtcttaagaaagaggtaaaaggcaagcaaaggagatgaaatctgttctgggaatgtttcagcagccaataagtgcccgagcacactgcccccggttgcctgcctgggccccatgtggaaggcagatgcctgctcgctctgtcacctgtgcctctcagaacaccagcagttaaccttcaagacattccacttgctaaaattatttattttgtaaggagaggttttaattaaaacaaaaaaaaattcttttttttttttttttccaattttaccttctttaaaataggttgttggagctttcctcaaagggtatggtcatctgttgttaaattatgttcttaactgtaaccagtttttttttatttatctctttaatctttttttattattaaaagcaagtttctttgtattcctcaccctagatttgtataaatgcctttttgtccatcccttttttctttgttgtttttgttgaaaacaaactggaaacttgtttctttttttgtataaatgagagattgcaaatgtagtgtatcactgagtcatttgcagtgttttctgccacagacctttgggctgccttatattgtgtgtgtgtgtgggtgtgtgtgtgttttgacacaaaaacaatgcaagcatgtgtcatccatatttctctacatcttctcttggagtgagggaggctacctggaggggatcagcccactgacagaccttaatcttaattactgctgtggctagagagtttgaggattgctttttaaaaaagacagcaaacttttttttttatttaaaaaaagatatattaacagttttagaagtcagtagaataaaatcttaaagcactcataatatggcatccttcaatttctgtataaaagcagatctttttaaaaagatacttctgtaacttaagaaacctggcatttaaatcatattttgtctttaggtaaaagctttggtttgtgttcgtgttttgtttgtttcacttgtttccctcccagccccaaaccttttgttctctccgtgaaacttacctttccctttttctttctcttttttttttttgtatattattgtttacaataaatatacattgcattaaaaagaaa

SEQ ID NO: 321 - DNA, 7667 bp, Homo sapiens
gtccgggttcgcttgcctcgtcagcgtccgcgtttttcccggccccccccaacccccccggacaggacccccttgagcttgtccctcagctgccaccatgagcgaccaagatcactccatggatgaaatgacagctgtggtgaaaattgaaaaaggagttggtggcaataatgggggcaatggtaatggtggtggtgccttttcacaggctcgaagtagcagcacaggcagtagcagcagcactggaggaggagggcaggagtcccagccatcccctttggctctgctggcagcaacttgcagcagaattgagtcacccaatgagaacagcaacaactcccagggcccgagtcagtcagggggaacaggtgagcttgacctcacagccacacaactttcacagggtgccaatggctggcagatcatctcttcctcctctggggctacccctacctcaaaggaacagagtggcagcagtaccaatggcagcaatggcagtgagtcttccaagaatcgcacagtctctggtgggcagtatgttgtggctgccgctcccaacttacagaaccagcaagttctgacaggactacctggagtgatgcctaatattcagtatcaagtaatcccacagttccagaccgttgatgggcaacagctgcagtttgctgccactggggcccaagtgcagcaggatggttctggtcaaatacagatcataccaggtgcaaaccaacagattatcacaaatcgaggaagtggaggcaacatcattgctgctatgccaaacctactccagcaggctgtccccctccaaggcctggctaataatgtactctcaggacagactcagtatgtgaccaatgtaccagtggccctgaatgggaacatcaccttgctacctgtcaacagcgtttctgcagctaccttgactcccagctctcaggcagtcacgatcagcagctctgggtcccaggagagtggctcacagcctgtcacctcagggactaccatcagttctgccagcttggtatcatcacaagccagttccagctcctttttcaccaatgccaatagctactcaactactactaccaccagcaacatgggaattatgaactttactaccagtggatcatcagggaccaactctcaaggccagacaccccagagggtcagtgggctacaggggtctgatgctctgaacatccagcaaaaccagacatctggaggctcattgcaagcaggccagcaaaaagaaggagagcaaaaccagcagacacagcagcaacaaattcttatccagcctcagctagttcaagggggacaggccctccaggccctccaagcagcaccattgtcagggcagacctttacaactcaagccatctcccaggaaaccctccagaacctccagcttcaggctgttccaaactctggtcccatcatcatccggacaccaacagtggggcccaatggacaggtcagttggcagactctacagctgcagaacctccaagttcagaacccacaagcccaaacaatcaccttagccccaatgcagggtgtttccttggggcagaccagcagcagcaacaccactctcacacccattgcctcagctgcttccattcctgctggcacagtcactgtgaatgctgctcaactctcctccatgccaggcctccagaccattaacctcagtgcattgggtacttcaggaatccaggtgcacccaattcaaggcctgccgttggctatagcaaatgccccaggtgatcatggagctcagcttggtctccatggggctggtggtgatggaatacatgatgacacagcaggtggagaggaaggagaaaacagcccagatgcccaaccccaagccggtcggaggacccggcgggaagcatgcacctgcccctactgtaaagacagtgaaggaaggggctcgggggatcctggcaaaaagaaacagcatatttgccacatccaaggctgtgggaaagtgtatggcaagacctctcacctgcgggcacacttgcgctggcatacaggcgagaggccatttatgtgtacctggtcatactgtgggaaacgcttcacacgttcggatgagctacagaggcacaaacgtacacacacaggtgagaagaaatttgcctgccctgagtgtcctaagcgcttcatgaggagtgaccacctgtcaaaacatatcaagacccaccagaataagaagggaggcccaggtgtagctctgagtgtgggcactttgcccctggacagtggggcaggttcagaaggcagtggcactgccactccttcagcccttattaccaccaatatggtagccatggaggccatctgtccagagggcattgcccgtcttgccaacagtggcatcaacgtcatgcaggtggcagatctgcagtccattaatatcagtggcaatggcttctgagatcaggcacccggggccagagacatatgggccataccccttaaccccgggatgcaaggtagcatgggtccaagagacatggaagagagagccatgaagcattaaaatgcatggtgttgagaagaatcaggagagggatacaagagaggagatggggtcccggcacccatctgtatcatcagtgcctctttgaaggtgggaaacattagtgaaaattctgttggtgccacgctttgatgagcatttgtttgaccccagtttcttcttacacttcttaccccagcctacccttcctgcatttctcttctcagctcttccatgatggattcccccccctttcctaaagccatcatgccttgataaatatatatgatcattgaaatactttttaacaaaaaacagattctatattattatatatatatatatatatataaagatatatagagatgcattcacaggggttggctgggaggaggaagaccattctgtgaccaaaataccttggtcattttttttatattgccttatttccctatggctgagccttgttgtgacacatcaagcttttctgtagatgttgtcttggcttcccaccagcttaagcgttcatatgctctgcttttagttcatatatacatacataatgtttttcctttcttaattttgtctttttgtttgggatcagcttcttgcactccttccctaactcaactgttgccgtctcatcttctctcatctgatcacttcatgttttgtttttgttactgcctggatgaggcacttctgtcaattttttcaggaccttagttccagcagcagaatggaaaaatccttgaagcccaggctgatgcttgaagtaactgtggagggagtgttcaaaatactactgacgcaggcaccttcttggcgctggagagtcaaaggcatctcccttcattagctgctctgagcatcaagaattagaagtctttcagtggaattgtacaagagtccctttgaagataataatcttggctcagtttgtataaactgtcaaattttcaaataataggtagggggctttcactaggaaaatcatgtgctcagaagaggaaatgactcgtagtcaggttcaggagttagtggagtatttggactttggtactgctgtcttccaaggtagctctaagttttgatgtgtgggcttctgagtttatattctgaaaggaaatacacttcttttgaacatccccactaggttcttttccattgtcaataaggagcatcagccagtgaatctgtttcaggtttccattctgcagaactcctccaaagcatgtgctagtggcaagacagtggttcttatgatgttttcccttaacttttccttgtatgttcttgggtggttcctaagggaaagggaagcacatgatcatgggaatgatagcccagaacaaaaagaaatcttgtcttaccacagtgttttataggagagattgggagaaatcatcctgttttctctgtgacctgatttcagaagagactgatccaaaaattataacggcagggaacctagtgcatttggcactgagatttaaatgcaaccagaattgtcctcaaggcccagccataaaagcattgtctctctcgaccttctggtatcttgttagagagcttttcactgtgaggaagtgtggaaaaatagctctgtgtgtgtgtgtgtgtgtgtgtgtgtgtgtgtgtgtaatctgttaggttggggataggttttctgctagccaatattaaaagagacctgcaataaaaaaattaccctgatctgatagaaagcaagtgtttttgtatgtgtgggtgaatgtgtgttcatgcccgtatatgtctacacacagatgacaaattatatttgaaatcgttggaaaataaattcagatcaaaatgcctttcaggcccattacctagaaatctatcttaaaacctgggtatgttcctaaggtcatttctttgcttatgctaaattaattacaattatgaatggaggatattctactgtacttttttaaaaagaaactatttttgtgtttgaaagtgaaaccaacatccagatctatagcagagtccttattcttctcataaatctttttactttggctacaaatagatgatggtatgattctattatatattttatataaaatccatccaaattaagttttgggtaagtgtgttgtttaatctgaactatagtaacttaatactctaaacaatagttcactccatttggtcctttctccacagatgtaattatgttttcaactcaggaactatggcaaggaactttccccagatcaaattctattaacgctgagatacaagtcatccatgcacagccactatcataccctttattctcactgaaaggcagaactcagaacctgttattttatgtctgtaatcatgtactttggcatcttttggaggaaaggggcaggataactcactggaatgtacagtattttgctagtgcatttcaaggaatggaatcttctccagtatgaaattaccagatataaaataatgtaatgatgctgaggatataagcttttagaaggtaatttgatggtatttctttctcgaatgaaaagctgctggtttaccctcaaccctattcattagcattaccatgagtgaatttatatctaattatttccacttgccctgttctcttcacaccaaggaagctccagatccagtatcttgtttggcctcaaaacagaagcagcttcttttgtctcccagcagtagtgagccactcagtctcttccacaggaagtttggagcctacattccttgagtcaggagcttattacagaaaaaccccgtttccctgaacttttggctaacagaaattaatttaactgacatgcatattgattctgaaatttttttcctaagtttttttcatttttttgaatgagttttttaaattttttagatgaccaaaacttgcagggcaggggatgcccagaagagtggtgagatagtaaaacacttattccctcatcctttcaggttttcaggttgcccatttatattcatttacatgtcatttgactgtctcactttttacccagaacagtaacaacccacaccgtcttccttcagggatttccaactggcactctgtgggtgctacacagaatgcaatttaatggatatttctcagcctggttcagaataaattgatcctttgatcccagaaagtatatactgaagtgtgggataaagattatgattaggggagggttggagacaaaagctgtaaattactatggctgatttatttctactatatacatatatattttttgcttttgtatatcctatataggaaactaagcattgtattttttttaacaaatctaaaaaagcactatgaactacaggtgtttgactttcaaaatatattttgtattgttaatatcttcacattgtgtgaatactggaagctgcagatctttgctaggacgcaataaatttatatactttttgaggggttcttctggggtgctaatcaggcccctgttatgcttagggggagccctggtgctacttgcttgaagttttcagtgtaagtaccctgatgccttttggaccttgggatcagatcaagagttttggagatcaggtaccaaggaaataaggacagtctagctgcctcaagtgaggggccctttgcatagctctccttccccctcactgaagctgggtagcctattggggttgagagggaaaatgtgaaatctcagaatttatctcccttagaagagagccagtaacttatgtacaaggatgaaagaaaggtcgcagcagtagctttggggaaagggaggaagatatggcacttctccaaccccggaaaacattgcttttgaaaactgctgataaaatatgagccggttattacttctgtttgggagactgtgctctctgtggtgcctctcttggctctactccacagataccagacctcttctaagaggatgagcagaccagctttgaggttgacctgtttctctttgtctgccttcccaaaacaccagcccccaggaagacattaagcagccttaagcttaaattcctactccctcttccaaatttggctcacttgccttagatccaaggcagggaaaggaaaagaaggggggtctctggctttattactcccctaagtctttactctgacttccccaaacccagaaagattttctccacagtgttcatttgaaagaggagtattttgtcccattttccccttcctcattatcaaacagccccagtcttccttgtctctgctaagaaagtagaggcatgatgatctgcctctcaactgccctaagtcctagctaagtatcaggggaaaaaaaaaaaaaaaaagcctaacaaatgggattagactagggctgcaagtagtgaggattttgttgatacctctgctgggatgtgtgctttcccatatcttgccttcaggaattacactgtgccttttccccagggatatgggctctgtctacccagtgctccagtttcccggtaactgctcttgaacattgtggacaagggcaggtcttcatatttttgatcatccctttctcccagtgaaatcccatagcccttacctagagtctagggcacaaagacttcggggaagatacactgagattgacctgaggagacatctacacacaccagtggcagctgccccagggcctgcttccccttcctaagtctgtcatcctctggaagggatgggtggtgctccaatctctggtgcctaaaaacccaagtttatttctctcttaacactggcaataaccagtccacaccactgttgccttttaaaacctcttaataatctcatgctgtgtttgttttgattccaatccaattatcaccagggctgtgtgggtaaatgcttttaaatgctctctcatcttgttcttccccctcaccccccactcttaggtatgtatgatgctaatcttgtccctaagtaagtttcttcctgctccttttgtatcttcctttcttgtctttcctcctaccttttgtctcttggtgttttgggacttttttttttttttttttggccttttgtacaaagattagtttcaatgtagtctgtagcctcctttgtaaaccaattaaaaagttttttaataaaaaaaaaaaa

SEQ ID NO: 322 - DNA, 4145 bp, Homo sapiens
caaacaagtgcggccatttcaccagcccaggctggcttctgctgttgactggctgtggcacctcaagcagcccctttcccctctagcctcagtttatcaccgcaagagctaccattcatctagcacaacctgaccatcctcacactggtcagttccaaccttcccaggaatcttctgtggccatgttcactccggttttacagaacagagaacagaagctcagagaagtgaagcaacttgcccagctatgagagacagagccaggatttgaaaccagatgaggacgctgaggcccagagagggaaagccacttgcctagggacacacagcggggagaggtggagcagggcctctatttcgagacccctgactccacacctggtgtttgtgccaagaccccaggctgcctcccaggtcctctgggacagcccctgccttctaccaggaccatgggtagcaacaagagcaagcccaaggatgccagccagcggcgccgcagcctggagcccgccgagaacgtgcacggcgctggcgggggcgctttccccgcctcgcagacccccagcaagccagcctcggccgacggccaccgcggccccagcgcggccttcgcccccgcggccgccgagcccaagctgttcggaggcttcaactcctcggacaccgtcacctccccgcagagggcgggcccgctggccggtggagtgaccacctttgtggccctctatgactatgagtctaggacggagacagacctgtccttcaagaaaggcgagcggctccagattgtcaacaacacagagggagactggtggctggcccactcgctcagcacaggacagacaggctacatccccagcaactacgtggcgccctccgactccatccaggctgaggagtggtattttggcaagatcaccagacgggagtcagagcggttactgctcaatgcagagaacccgagagggaccttcctcgtgcgagaaagtgagaccacgaaaggtgcctactgcctctcagtgtctgacttcgacaacgccaagggcctcaacgtgaagcactacaagatccgcaagctggacagcggcggcttctacatcacctcccgcacccagttcaacagcctgcagcagctggtggcctactactccaaacacgccgatggcctgtgccaccgcctcaccaccgtgtgccccacgtccaagccgcagactcagggcctggccaaggatgcctgggagatccctcgggagtcgctgcggctggaggtcaagctgggccagggctgctttggcgaggtgtggatggggacctggaacggtaccaccagggtggccatcaaaaccctgaagcctggcacgatgtctccagaggccttcctgcaggaggcccaggtcatgaagaagctgaggcatgagaagctggtgcagttgtatgctgtggtttcagaggagcccatttacatcgtcacggagtacatgagcaaggggagtttgctggactttctcaagggggagacaggcaagtacctgcggctgcctcagctggtggacatggctgctcagatcgcctcaggcatggcgtacgtggagcggatgaactacgtccaccgggaccttcgtgcagccaacatcctggtgggagagaacctggtgtgcaaagtggccgactttgggctggctcggctcattgaagacaatgagtacacggcgcggcaaggtgccaaattccccatcaagtggacggctccagaagctgccctctatggccgcttcaccatcaagtcggacgtgtggtccttcgggatcctgctgactgagctcaccacaaagggacgggtgccctaccctgggatggtgaaccgcgaggtgctggaccaggtggagcggggctaccggatgccctgcccgccggagtgtcccgagtccctgcacgacctcatgtgccagtgctggcggaaggagcctgaggagcggcccaccttcgagtacctgcaggccttcctggaggactacttcacgtccaccgagccccagtaccagcccggggagaacctctaggcacaggcgggcccagaccggcttctcggcttggatcctgggctgggtggcccctgtctcggggcttgccccactctgcctgcctgctgttggtcctctctctgtggggctgaattgccaggggcgaggcccttcctctttggtggcatggaaggggcttctggacctagggtggcctgagagggcggtgggtatgcgagaccagcacggtgactctgtccagctcccgctgtggccgcacgcctctccctgcactccctcctggagctctgtgggtctctggaagaggaaccaggagaagggctggggccggggctgagggtgcccttttccagcctcagcctactccgctcactgaactccttccccacttctgtgccacccccggtctatgtcgagagctggccaaagagcctttccaaagaggagcgatgggcccctggccccgcctgcctgccaccctgccccttgccatccattctggaaacacctgtaggcagaggctgccgagacagaccctctgccgctgcttccaggctgggcagcacaaggccttgcctggcctgatgatggtgggtgggtgggatgagtaccccctcaaaccctgccctccttagacctgagggacccttcgagatcatcacttccttgcccccatttcacccatggggagacagttgagagcggggatgtgacatgcccaaggccacggagcagttcagagtggaggcgggcttggaacccggtgctccctctgtcatcctcaggaaccaacaattcgtcggaggcatcatggaaagactgggacagcccaggaaacaaggggtctgaggatgcattcgagatggcagattcccactgccgctgcccgctcagcccagctgttgggaacagcatggaggcagatgtggggctgagctggggaatcagggtaaaaggtgcaggtgtggagagagaggcttcaatcggcttgtgggtgatgtttgaccttcagagccagccggctatgaaagggagcgagcccctcggctctggaggcaatcaagcagacatagaagagccaagagtccaggaggccctggtcctggcctccttccccgtactttgtcccgtggcatttcaattcctggccctgttctcctccccaagtcggcaccctttaactcatgaggagggaaaagagtgcctaagcgggggtgaaagaggacgtgttacccactgccatgcaccaggactggctgtgtaaccttgggtggcccctgctgtctctctgggctgcagagtctgccccacatgtggccatggcctctgcaactgctcagctctggtccaggccctgtggcaggacacacatggtgagcctagccctgggacatcaggagactgggctctggctctgttcggcctttgggtgtgtggtggattctccctgggcctcagtgtgcccatctgtaaaggggcagctgacagtttgtggcatcttgccaagggtccctgtgtgtgtgtatgtgtgtgcatgtgtgcgtgtctccatgtgcgtccatatttaacatgtaaaaatgtcccccccgctccgtcccccaaacatgttgtacatttcaccatggccccctcatcatagcaataacattcccactgccaggggttcttgagccagccaggccctgccagtggggaaggaggccaagcagtgcctgcctatgaaatttcaacttttcctttcatacgtctttattacccaagtcttctcccgtccattccagtcaaatctgggctcactcaccccagcgagctctcaaatccctctccaactgcctaaggccctttgtgtaaggtgtcttaatactgtcctttttttttttttaacagtgttttgtagatttcagatgactatgcagaggcctgggggacccctggctctgggccgggcctggggctccgaaattccaaggcccagacttgcggggggtgggggggtatccagaattggttgtaaatactttgcatattgtctgattaaacacaaacagacctcagaaaaaaaaaaaaaaaaaaaaaaaaaaaaaaaaaaaaaaaaaaaaaaaa

SEQ ID NO: 323 - DNA, 2518 bp, Homo sapiens
tttgcttttgcttatttccgtccatttccctctctgcgcgcggaccttccttttccagatggtgagagccgcggggacacccgacgccggggcaggctgatccacgatcctgggtgtgcgtaacgccgcctggggctccgtgggcgagggacgtgtggggacaggtgcaccggaaactgccagactggagagttgaggcatcggaggcgcgagaacagcactactactgcggcgagacgagcgcggcgcatcccaaagcccggccaaatgcgctcgtccctgggaggggagggaggcgcgcctggagcggggacagtcttggtccgcgccctcctcccgggtctgtgccgggacccgggacccgggagccgtcgcaggtctcggtccaaggggccccttttctcggaagggcggcggccaagagcagggaaggtggatctcaggtagcgagtctgggcttcggggacggcggggaggggagccggacgggaggatgagctcccctggcaccgagagcgcgggaaagagcctgcagtaccgagtggaccacctgctgagcgccgtggagaatgagctgcaggcgggcagcgagaagggcgaccccacagagcgcgaactgcgcgtgggcctggaggagagcgagctgtggctgcgcttcaaggagctcaccaatgagatgatcgtgaccaagaacggcaggaggatgtttccggtgctgaaggtgaacgtgtctggcctggaccccaacgccatgtactccttcctgctggacttcgtggcggcggacaaccaccgctggaagtacgtgaacggggaatgggtgccggggggcaagccggagccgcaggcgcccagctgcgtctacatccaccccgactcgcccaacttcggggcccactggatgaaggctcccgtctccttcagcaaagtcaagctcaccaacaagctcaacggagggggccagatcatgctgaactccttgcataagtatgagcctcgaatccacatagtgagagttgggggtccacagcgcatgatcaccagccactgcttccctgagacccagttcatagcggtgactgcttatcagaacgaggagatcacagctcttaaaattaagtacaatccatttgcaaaagctttccttgatgcaaaggaaagaagtgatcacaaagagatgatggaggaacccggagacagccagcaacctgggtactcccaatgggggtggcttcttcctggaaccagcaccctgtgtccacctgcaaatcctcatcctcagtttggaggtgccctctccctcccctccacgcacagctgtgacaggtacccaaccctgaggagccaccggtcctcaccctaccccagcccctatgctcatcggaacaattctccaacctattctgacaactcacctgcatgtttatccatgctgcaatcccatgacaattggtccagccttggaatgcctgcccatcccagcatgctccccgtgagccacaatgccagcccacctaccagctccagtcagtaccccagcctgtggtctgtgagcaacggcgccgtcaccccgggctcccaggcagcagccgtgtccaacgggctgggggcccagttcttccggggctcccccgcgcactacacacccctcacccatccggtctcggcgccctcttcctcgggatccccactgtacgaaggggcggccgcggccacagacatcgtggacagccagtacgacgccgcagcccaaggccgcctcatagcctcatggacacctgtgtcgccaccttccatgtgaagcagcaaggcccaggtcccgaaagatgcagtgactttttgtcgtggcagccagtggtgactggattgacctactaggtacccagtggcagtctcaggttaagaaggaaatgcagcctcagtaacttccttttcaaagcagtggaggagcacacggcacctttccccagagccccagcatcccttgctcacacctgcagtagcggtgctgtcccaggtggcttacagatgaacccaactgtggagatgatgcagttggcccaacctcactgacggtgaaaaaatgtttgccagggtccagaaactttttttggtttatttctcatacagtgtattggcaactttggcacaccagaatttgtaaactccaccagtcctactttagtgagataaaaagcacactcttaatcttcttccttgttgctttcaagtagttagagttgagctgttaaggacagaataaaatcatagttgaggacagcaggttttagttgaattgaaaatttgactgctctgccccctagaatgtgtgtattttaagcatatgtagctaatctcttgtgttgttaaactataactgtttcatatttttcttttgacaaagtagccaaagacaatcagcagaaagcattttctgcaaaataaacgcaatatgcaaaatgtgattcgtccagttattagtgaagcccctccttttgtgagtatttactgtttattg

SEQ ID NO: 324 - DNA, 5886 bp, Homo sapiens
gtgaggagggccggcggcggggcggacccctggcggtcctcctggctggggtccgcgcgctcgcggcagctccccgtggaggtcactgtccgtgccagtccctcccgctgtcccgccctctcccgctgccgccgccgccgccgccgcgcccgcctcagcgcccccactccgcgcttgggagcgaggagccgccagcgcccccgccccgccgccgccgcagcgccctcaggccgccattcgccaccgaaactttccagcgcccgcgctctctccgggactcggcggcggcggggcgggggcggcccgggggcggcgcgcggctgctccggggcgccgggccctcttcggccgccgcacggccgggactcggaggctgccggctggagggaggttcggagcgcggccgggcgcgcggcgccgccacaagttgcgctgctcgcgacgagatttccgtgagggtggaagaaaatcataccatatcagatgcctcgcagagcaccaggcccaccgtgaaaggctggtccctgcagacggcttcccatttttatgaccggatgctgggaagcctgctggtccacaggtccatacatgaagtcaccataaggagccctggcctccttgcagaaacatcgaggtgacatgtagcatgaccgagctcgctggcgcctcttcatcgtgctgccaccgccctgcaggaagaggggccatgcagtcagtcttgcaccactttcaacgtttgcgagggagagagggtggttcccacttcatcaacacctcatcgccgcgaggtgaggctaagatgagcataaccagtgacgaggtgaactttctggtgtatcggtatctccaggagtcaggtttttcccactcggctttcacgtttgggattgagagccacatcagccagtccaacatcaatgggacgctagtgccaccggccgccctcatctccattctccagaagggcctgcagtatgtagaggccgagatcagtatcaacgaggatggcacagtgttcgacggccgccccatagagtccctgtcactgatagacgccgtgatgcccgacgtggtgcagacgcggcagcaggcattccgagagaagctcgctcagcagcaagccagtgcggcggcggcggcggctgcggccacggcagcagcgacagcagccaccacgacctcagccggcgtttcccaccaaaatccatcgaagaacagagaggccacggtgaatggggaagagaacagagcacattcagtcaataatcacgcgaagccaatggaaatagatggagaggttgagattccatccagcaaagccacagtccttcggggccatgagtctgaggtgttcatttgtgcctggaatcctgtcagtgatttgctagcctccggatctggagactcaactgcaaggatatggaacctgaatgagaatagcaacgggggctccacccagctcgtgttgaggcactgtatacgagaggggggccatgacgtcccgagtaacaaagacgtcacctcactggactggaataccaatggaacactcttggctacgggttcatatgacggttttgcaagaatatggacggaagatggtaacctggccagcaccttaggccaacataaaggccccatctttgccttgaaatggaaccgaaaggggaattacattttgagtgctggtgtagacaaaacaacaataatttgggatgcccacacaggagaagccaaacagcagtttccttttcattcagcccctgcccttgatgtggactggcagaacaacacgacctttgcctcctgtagcacagacatgtgtatccatgtgtgcaggctcggctgtgaccgcccagtcaaaaccttccagggacacacaaacgaggtcaacgccatcaaatgggatccgtctggaatgttgctggcatcctgctcggatgacatgacattgaagatctggagcatgaaacaggaggtgtgcatccatgatcttcaggctcacaataaagagatctacaccatcaagtggagccccactgggcccgccaccagcaacccaaactccaacatcatgttggcaagtgcttcgtttgattctacggtgcgactgtgggacatagaacgaggcgtctgcacccacacgctcacgaagcatcaggagcctgtctatagcgtagctttcagccctgatgggaagtacttggccagtggatccttcgacaagtgcgtccatatctggaatactcagagtggaaatcttgtccacagctaccgaggcactggcggcatcttcgaggtgtgctggaacgcccgaggagacaaagtgggtgccagcgcgtccgacggctctgtgtgtgttttggatctgcggaagtaaccacaaaatattatcgaaaaaagaaaagaattctaatgaccagccgtgaatgtgtagggttgcagctctattctccaaaactgtaggaacttgacttgcgttagagtgtactctgaaaccaactcgtctctggccgcaggagtctatatgttttcgtaatcttcatcaagaagtttttaaaaggcaagcaaaaacagaagcaaatcatatcaaacggggatagaatggtttccactgaggacattcagcctgggaaggaggaagtcaccagctcgaggcgtgtggattggtttccacccggaacaggctctgtgatggctgaatggaaagaaacgtaaaaagctgtgccaaaaaaaaagcaaaatgctgtgataaaccaaacagggaagggggaaaaaccctcctccttgggatttttttttttttgttttccctaacaatttggacactacaattgctctcacaaaggaggttcaaagaccagtttgtaccgatgaaacgcgcaactttgtaatcccaacactttctattttctagaatcttctttgttcattgggtggtttttcagtcggctggaattctatcttctgggggccttccgtctgagatggaagctgtcttgggcttgttgtctcttccttctgttgctccctgcccctccccctgtctttccactctgtctggtgagctctgctttttcagtgcaccatcaagagatgcagccccgtggacatgaagacacaatctcccacggacagctttcccccttccgccctctcccaccctctcctccccttgcgctcgcgctcgcgctcgctttctcactggcgtgctctctttctctctctctctccctctgtacctttctcatagttgcttcagatcttaggtctcaagggcactttggcgcgtagtaagtgctttatgtaagaaggcagggcaggggggcctttttacaggagaaaaaaaaatgacttataagagaaagagcctggagtatttttggaaaaaaaaataatatttttatgttaaaacaattttaaaatcttaaaatggccatcagacatagagagctttgtgtgattcatgttttaaaaagaaccgaagaagccacaggcagggcctgagggagcccctggctttcccctcagcctcaggaaaggtggtcaggaaaactctggctggacaagggtcagtcttcggggtcagcagcgagattgctctgcagccagtgagggaggtccccgccatgccggctggaagaagaacctcgcatcttttggtgtgtatgcaccttggcagccagcaggaaagcagcgaagagccgcgcgccctctggcctcaagggagcattggcagaaccataaggtactgcagaagccgtcgaaaccgactgctcggctggattaggcgtgttggctacatctttcccacaaccgtataacgaccgatggtcatttctccaagagcaggcttggcgagtccttgcagagctgacatagaggcgcccgcatgtcacttagtctaacgctgacagaaatgaatgcagaaggaagattttcagtcctgaacgtgaattatagaggtagaacgtcgctaataatttctgccatcttcataatttctttgtctcacagaagactaggagaaagatcttttttaaataatctttttgctgtttttaaaaaattaaacaaggctttgtgttcctagaagagcttcatttcagtgaatctggtgacctccatctgcttgctgtcataacccgacacggacttatttttgtcattagcaagggggaaaaggccaaaggacaagggcctcttctcccattggttttcctgtgggcagaagggctgaggaagatggcccagcccgtgggggctgctgggtcaccagcagcgggtagggtgcaatctggtgtgtgttccagcagtgagacggtgttattgtgaaggtggcattcatctgcggagccaaaacccagccatcggggaagggtcagggcttctgtggaacttggaacgtgccaggaccacctgcaaaagccagggtgcgttgatcattctcagatcattgattggcctccacttgggtatgtgaattattcatgtcccagaagaccaaaaagtgctctggttctgagatgagtattttattcgtgttctgtttccgaaacacttagcaaagaaggtcacagtgatgtggagtcgccgcacccatctttgaagatagccagtgtccctggatgaggtgatgatttcccgtcccaaggactctgtgaagtttagagtacagtttgttggggtccaaaagacaccatctctaccccacccaaataaaaatgcactcatctctgtagaacatctgctgtcaaaggccagcctgtcgttagggcatggcttatgcttgacaaaccagtaacaactgtgggatggcgatggtgggatgtgtcgcaagcaattcactagacaatcttcacatgaatgtcggtagccagggtctctcccgagggatggctttagtcttgatgaatgtgaaccatgtcggaattgttaggtagaaacctgggctgggaggcctcggaccccaggctccatccctggcttccccagcctgcggccgcaagcaaaaccaagcgcgagatgcagctagcacccttcatatccatccccgttctcagcgggacaacaccatggacagccgttttcagagcctccagcatttgcacaccactactcaccctctctgctgctggcatgttggtagagtcatccctgtaatcaagaaatggcctgtggaatgttattgttcaacgttgtttacagctcttaaaacatggtgaggaatgcctaagtcttagtgaccaaacgtgaccttgaaagcagacatagcatgacagaccttcctagagtgtttggtcgggttcacagtgaccgagagtcaggtccagcacacacctgggaaagggatgctgccccaagggggaccaaaagggccggacgttacagggtgaaaccctctgacccctcgcgacaccgtaggacttgacttttgtttagtctttctaagaaatagatcatggagccaagtgaagtgcactttgtcaaatgtaagggtctgctttgttcttgttgcttttctgttttttaaccttttgttccgccatttaaaaaaagaaaaaaaaaaagcttatgtttcttgtcaaatgcagaaatgttccttccgccactcactgaagttttgcattctggcttgtgcagtttttattgtctgtgtcagacgtacagccagacatgttctctattggcatttttccgattctgttcagatgacagcgaccgccttttcattccccccgccacctgtactcaccctcacgctctttgaagaaaaaaaaaaaaaatcaccttgtgtgttgtagctcatttgtttcaagagagaatcaacagatcatattcagtgtcttgaataaattgctctattttgatattaaaaaaaaaaaa

SEQ ID NO: 325 - DNA, 5911 bp, Homo sapiens
aattgcctctcaccccccggaggggttattttgggggtggttggaggcggtggcggcggcggcgaggaggggaatttccttgtgcctccattcccgggaggggggagcggcgttggaggccaccgtttccagcatcaacaacagcaacttgtgattggcggtgaccggatattcagttgcacatccccacatcaatgcactgccaatgggttatatcctgtgttgtgacctcatggtttaagtgggaataaagatgagtataagcagtgatgaggtcaacttcttggtatatagatacttgcaagagtcaggattttctcattcagcatttacctttggtatagaaagccatatcagtcagtccaatataaatggtgccctcgtcccacccgctgcattgatttctatcatccagaaaggtctacagtatgtagaagcagaagttagtattaatgaggatggtaccttgtttgatggtcgaccaatagagtctctgtccctgatagatgccgtaatgcctgatgtagtacaaacaagacaacaagcttatagagataagcttgcacagcaacaggcagcagctgctgcagctgccgcagctgcagccagccaacaaggatctgcaaaaaatggagaaaacacagcaaatggggaggagaatggagcacatactatagcaaataatcatactgatatgatggaagtggatggggatgttgaaatccctcctaataaagctgttgtgttgcggggccatgaatctgaagtttttatctgtgcctggaaccctgttagtgatctcctagcatcagggtctggagactcaacagcaagaatatggaatcttagtgagaacagcaccagtggctctacacagttagtacttagacattgtatacgagaaggagggcaagatgttccaagcaacaaggatgtcacatctctagattggaatagtgaaggtacacttctagcaactggttcctatgatgggtttgccagaatatggactaaagatggtaaccttgctagcaccttagggcagcataaaggccctatatttgcattaaaatggaataagaaaggaaatttcatcctaagtgctggagtagacaagactacaattatttgggacgcacatactggtgaagccaagcaacagtttccttttcattcagcaccagcattggatgttgattggcagagcaacaacacctttgcttcttgtagtacagatatgtgcattcatgtctgtaaattaggacaagacagacctattaaaacattccaaggacatacgaatgaagtaaatgctatcaaatgggacccaactggcaatctcttggcctcctgttctgacgacatgactttaaagatatggagtatgaaacaagacaattgtgtccatgatttgcaagcacataataaagaaatttatactatcaaatggagtccaacaggaccagggactaataatccaaatgccaaccttatgttagcaagtgcatcctttgattctactgttaggttatgggatgtagaccgagggatatgcatccataccttgacaaaacaccaagagcctgtgtacagtgtagctttcagtcctgatggcaggtatctggcaagtggttcttttgacaaatgtgtacacatctggaacacgcagacaggtgctctagttcacagctataggggaacaggtggaatatttgaagtttgctggaatgcagcaggagacaaagttggagccagtgcatcagatggttcagtttgtgtattagaccttcggaaatagcgctactagttggaagccatggaccgactatgaatgtgtacatagccaaaatgactgtccctgacccatgtactgctatagtcccacttgaaccatggccagtccactacagccaaatctaaaagaaatatatacatacagtgtatataaacaaaattgcaccctgaagatgacagagttttgtcacagcttgtgaattctgttcaccaagtgctggaatctaatctgctgtgcccctaaaatagcatttagaagttttggatatgaaaaacagaagagagaaaaatatacattataaaagcagaacatacatgtaccagtttttggatactaaatgacagccttgtttctcccctttgaatcagcagacaccatggattatattctttttttcccttcagtagtgagcagtttgtatgtacagagaaaatggacttacaaaaacttgcagcagtagtttgttcttgctttaaaatttcgtttttggtttagattatggatgcatgaagtaagggagtgaatcagtttcttgtttatatttttttcaccttttaaacaaaaaattctttaaaatattttaatgcattcttttgaagaggtagatgtttggtacattttatggctcccagagcatatattcagttggtgcatgttgtggaagggggaattggaaattaaatgaaaacctatgactttggtcatgtcaatctgtaagacacatcagtaaaagggtattatgctctgttggttttgtttttttgttttgctttttttttttttttttcttttttgttttttggtgatgtggcttaaatgcaatagtttcttttttgggacatatttctgccaattaaagactagaagggcacaactttttttttaattaccatagagaagatacattaaaaaaaatcttctgatgttttgtagccataactaaattatggtaaaaatgtgcactattgtgaaaaggagcaacgtagttttgggttttttgttgtttgtttgttttgctttgttttttaagagattaaaatgtttctggataaggattagcttctcgaagtgtccatcattctgtgtagaagcttaaatatgtaatgtaaccaaactccagtattaaaaatctctcatgttgttttctttatacaaagcaagataacggcatataacactgccattacatggcaaaatgtttgctaccttagtttaaaaaacaatctcaaacaaaagacttgcttcaaggtgtttttaaatagcagtgattcagaattttttttaatgaaagtataattgcactaaccttcttcctgctgctctgattctgcatttgtggtacttgtgactacgttttttcaaatatagatagatttaagctgctaatttttttttttttagtaatcactactatatcatgtcttttactctgtttataatatcaagtattttcttaaagatatagatattaaaccttgtgctcatgcaacttagagtaacatatacagacaaatgattgcatgaggccatgtttatatgtgtgactaataaggcttgtcatgattaacataatccaggtatgtcatttctgaagagaatagtcatcaaatttatatctcgaagattttaattaaggaattgcttattgttgagcttagcaaattaataacactatttctgtcactaattattttgaggccttttagtactaaaattttaacctgtgttctaagtagaaactgatttaacccaagtaatgcagctttgattgatttcagcattcgttgctttgctatttttacaaaacagcattgattgaagcaagtcttggttttactaaggtagggtagcatttgctattggtaaagagaataaatacacttaatttcacaatacattgttatatgtaccccagttgttgttagtggggactatgatactgtaataatatttttaaaaatttacatcaagagaggcagtcattcacgatggttttgtgccagctctttttagggttttggatcacattagagatatttagaacatattaccctgtgacttacgtaggaaacctaatatgctgagtatctggcacttgaattcctgcttttattgctggaggtccacatctgtggttgacctctgttattgtttaaaaaaaataaataaaaattaaaaaaatctgtgcaataattttaaaatgtgctcccaggaatagacacaaatgttttgagtatcttttaagctgcattttcctttagtgatgcatttgtcaattgcactgaatttaaatctgaaagtcagaggtgattattgatagtacttttgtattttgatatggacagtttattcatttgcatacagttattgactttttcccagctgattaaaagatagtcaagaaattctgcaatatagctgccaaaatagacagctacatttttatgatattgtcatcttttctgttttttttttcttttttttctttagctattttacttaagcataatagccacaataggacatataaaagattataaatacagagctttattatcctgacgtcttgggtcttttaagtatatacttttctgaaaggtatccattttgtaggcttgggttcttcatgagcatacgattgtttatttttgctgctgttctcaacatcatcattgcctgctgatgtgccacgatgctgctccaatagacagcaataagattgtctctaatttgagcagtaacatgattgcaagagaccaagtttcacagcttgtaaagttctgtatttgggattcttgcttatttttccgcctgtgtttttctgagaacttattcctgatgatcaattgaatccagtagtttttctatgctatttgttgttgtataagctactgtaagaaacttatcataaggaaaaatagaaaggaaaacttgaatcaatactcattgattaaaatggaataaagaaagagcagctgccacttttaaacaacataaaggaatatctttttttgtctccgtgtaggaaatcccataagttcttatatttgttccagttcccatttcctgccattgaccagataacatcattgactttcaaatgacttttagaagtgataactcttaatttcctaatagatactagattgtattgaattctgttttaattattctctaggtaagtatgttttaggattaaataccttttacagatactgaaagtgcctccttttgtggtgtaaaaaacaaattatggtgcaaaaagtaatcactagattgaaatacatgaaggttttttgctttttgacatacgaaaatgtcaagagaaaggccaaagatttgtactttttcacttacaaagcactcctttttcccttaaacttctttctgtcaaattagatttaatgagagagtactatttttaaggagctatctgtttatgtagaatgattttgttaagagtaatgtaaactattattgagtagaggcctaaagaggactgtgcatttttgctatttaaaggaatcacaaatgatcatacttaagtgagcaaaaatgacaagttttactagctaagtagagaaataaatctcaaatgcagcgctacaattttcattatcttaagcacattgtacatttctacagaacctgtgattattctcgcatgataaggatggtacttgcatatggtgaattactactgttgacagtttccgcagaaatcctatttcagtggaccaacattgtggcatggcagcaaatgccaacattttgtggaatagcagcaaatctacaagagaccctggttggtttttcgttttgttttctttgttttttcccccttctcctgaatcagcagggatggaaggagggtagggaagttatgaattactccttccagtagtagctctgaagtgtcacatttaatatcagttttttttaaacatgattctagttaaatgtagaagagagaagaaagaggaagtgttcacttttttaatacactgatttagaaatttgatgtcttatatcagtagttctgaggtattgatagcttgctttatttctgcctttacgttgacagtgttgaagcagggtgaataactagggcatata

SEQ ID NO: 326 - DNA, 2376 bp, Homo sapiens
ccagtgcccccaattcgcgctcgggagtgaggagccgccaacaccccagctccgctgctgccgccaccgcagtgctctctagtcgccattggttacctaaactttccagtacccgcgacctttccgggactccgcggcggcggggcagaggcggcccaggggcggcacgcggctgctccggtgcgccgggctcttttcggccgccgcacggccgggcctcacaggctgccctcctgagagaggctcagaacacggccaggtacgcgccgccgccacagttgcgctgctagcgacgaggtgttttcctctgctggcacgccagaatccctggttcagcctggaaggcgaggggcaggactccccagacagtggcctcagtgtggggaatgccagctgttctcttaacagaagggcagtttttgaagaaatgaagcaggacttgatgtggattgtcataaactgtttctccctaaagaggctggtccccacagacggcttgccatttctatgactggatgctgagaagcctgctggttcagaggtccacacatgaagttaccataaagagggtggttccaacttcatcaatacctcatcgccatgaggtgaggctaagatgagcataaccagtgacgaggtgaactttctggtttatcggtatctccaggagtcaggtttttctcactcggctttcacgtttgggatcgagagccacatcagccagtccaacatcaatgggacactagtgccaccgtctgccctcatctccattctccagaagggactgcagtatgtagaggctgagataagcatcaacaaggatggcacagtgttcgacagccgccctatagagtccctgtccctgatagttgctgtgattcctgatgtggtgcagatgcggcagcaggcatttggagagaagctcactcagcagcaagccagtgcagcagccacagaggcatcagcaatggcaaaggcggcaaccatgaccccagctgctatttcccagcaaaatcctccaaagaaccgagaggccacagtgaacggggaagagaatggagcacatgaaatcaataatcactcaaagccaatggaaatagatggggatgttgagattccacccaacaaagccacagtccttcggggccacgagtctgaggtgttcatttgtgcctggaaccctgtcagtgatttgctagcctctggatctggagactcaactgcaaggatatggaacctgaatgagaatagcaacgggggctccacccagctcgtgttgagacattgtatacgagaaggggggcacgacgtcccaagtaataaagatgtcacctcactggactggaacagtgatggaacactattggctatgggttcatatgatggtttcgcaagaatatggacagaaaatggtaacctggccagcaccttaggccaacataaaggccccatcttcgctctgaaatggaacaaaaaggggaattatgttttgagtgctggtgtagacaaaacaacaataatttgggatgctcacacaggagaagccaaacagcagtttccttttcattcagcccccgcccttgatgtggactggcagaacaacatgacctttgcctcctgtagcacagacatgtgtatccatgtgtgcaggctcggctgtgaccacccagtcaaaaccttccagggacacacaaacgaggtcaatgccatcaaatgggatccttctggaatgttgctggcgtcctgctcggatgacatgacattgaagatctggagtatgaagcaggatgcatgcgtccacgatcttcaggctcacagcaaagagatctacaccatcaagtggagccccaccgggcctgccaccagcaacccaaactccagcatcatgttggcaagtgcttcatttgattctacagtgcgactgtgggatgtggagcaaggtgtctgcacccacacactcatgaagcatcaagagcctgtctacagtgtagctttcagccccgatggaaagtacttggctagtggatcctttgacaagtatgttcatatctggaatactcagagtggaagtctcgtccacagctaccaaggcactggcggtatcttcgaggtgtgctggaacgcccgaggagataaagtgggcgccagcgcgtctgatggctctgtgtgtgttctggatctgtgaaagtaaacacaaaatatagaaaaaaagaaaagaattctaatgacctgccttgaatgcatggggttgcagctctgttcaaacacaattctatcagctccaaaatgtgtgaacttgacttgtgttagagtatattctgaaaccaacttgtcccaggccacaggagtgtatatgtttcataatctttatcaaga

SEQ ID NO: 327 - DNA, 4396 bp, Homo sapiens
gcctgaggtgcccgccctggccccaggagaatgaaccagccgcagaggatggcgcctgtgggcacagacaaggagctcagtgacctcctggacttcagcatgatgttcccgctgcctgtcaccaacgggaagggccggcccgcctccctggccggggcgcagttcggaggttcaggtcttgaggaccggcccagctcaggctcctggggcagcggcgaccagagcagctcctcctttgaccccagccggaccttcagcgagggcacccacttcactgagtcgcacagcagcctctcttcatccacattcctgggaccgggactcggaggcaagagcggtgagcggggcgcctatgcctccttcgggagagacgcaggcgtgggcggcctgactcaggctggcttcctgtcaggcgagctggccctcaacagccccgggcccctgtccccttcgggcatgaaggggacctcccagtactacccctcctactccggcagctcccggcggagagcggcagacggcagcctagacacgcagcccaagaaggtccggaaggtcccgccgggtcttccatcctcggtgtacccacccagctcaggtgaggactacggcagggatgccaccgcctacccgtccgccaagacccccagcagcacctatcccgcccccttctacgtggcagatggcagcctgcacccctcagccgagctctggagtcccccgggccaggcgggcttcgggcccatgctgggtgggggctcatccccgctgcccctcccgcccggtagcggcccggtgggcagcagtggaagcagcagcacgtttggtggcctgcaccagcacgagcgtatgggctaccagctgcatggagcagaggtgaacggtgggctcccatctgcatcctccttctcctcagcccccggagccacgtacggcggcgtctccagccacacgccgcctgtcagcggggccgacagcctcctgggctcccgagggaccacagctggcagctccggggatgccctcggcaaagcactggcctcgatctactccccggatcactcaagcaataacttctcgtccagcccttctacccccgtgggctccccccagggcctggcaggaacgtcacagtggcctcgagcaggagcccccggtgccttatcgcccagctacgacgggggtctccacggcctgcagagtaagatagaagaccacctggacgaggccatccacgtgctccgcagccacgccgtgggcacagccggcgacatgcacacgctgctgcctggccacggggcgctggcctcaggtttcaccggccccatgtcgctgggtgggcggcacgcaggcctggttggaggcagccaccccgaggacggcctcgcaggcagcaccagcctcatgcacaaccacgcggccctccccagccagccaggcaccctccctgacctgtctcggcctcccgactcctacagtgggctagggcgagcaggtgccacggcggccgccagcgagatcaagcgggaggagaaggaggacgaggagaacacgtcagcggctgaccactcggaggaggagaagaaggagctgaaggccccccgggcccggaccagcccagacgaggacgaggacgaccttctccccccagagcagaaggccgagcgggagaaggagcgccgggtggccaataacgcccgggagcggctgcgggtccgtgacatcaacgaggcctttaaggagctggggcgcatgtgccaactgcacctcaacagcgagaagccccagaccaaactgctcatcctgcaccaggctgtctcggtcatcctgaacttggagcagcaagtgcgagagcggaacctgaatcccaaagcagcctgtttgaaacggcgagaagaggaaaaggtgtcaggtgtggttggagacccccagatggtgctttcagctccccacccaggcctgagcgaagcccacaaccccgccgggcacatgtgaaaggtatgcctccgtgggacgagccacccgctttcagccctgtgctctggccccagaagccggactcgagaccccgggcttcatccacatccacacctcacacacctgttgtcagcatcgagccaacaccaacctgacaaggttcggagtgatgggggcggccaaggtgacactgggtccaggagctccctggggccctggcctaccactcactggcctcgctccccctgtccccgaatctcagccaccgtgtcactctgtgacctgtcccatggatcctgaaactgcatcttggccctgttgcctgggctgacaggagcattttttttttttccagtaaacaaaacctgaaagcaagcaacaaaacatacactttgtcagagaagaaaaaaatgccttaactataaaaagcggagaaatggaaacatatcactcaagggggatgctgtggaaacctggcttattcttctaaagccaccagcaaattgtgcctaagcgaaatattttttttaaggaaaataaaaacattagttacaagattttttttttcttaaggtagatgaaaattagcaaggatgctgcctttggtctctggtttttttaagctttttttgcatatgttttgtaagcaacaaatttttttgtataaaagtcccgtgtctctcgctatttctgctgctgttcctagactgagcattgcatttcttgatcaaccagatgattaaacgttgtattaaaaagaccccgtgtaaacctgagccccccccgtccccccccccggaagccactgcacacagacagacggggacaggcggcgggtcttttgtttttttgatgttgggggttctcttggttttgtcatgtggaaagtgatgcgtgggcgttccctgatgaaggcaccttggggcttccctgccgcatcctctcccctcaggaaggggactgacctgggcttgggggaagggacgtcagcaaggtggctctgaccctcccaggtgactctgccaagcagctgtggccccagcggtaccctacacaacgccctccccaggcccccctaagctgctctcccttggaacctgcacagctctctgaaatggggcattttgttgggaccagtgacccctggcatggggaccacaccctggagcccggtgctggggacctcctggacaccctgtccttcactccttgccccagggacccaggctcatgctctgaactctggctgagaggagtctgctcaggagccagcacaggacaccccccaccccaccccaccatgtccccattacaccagagggccatcgtgacgtagacaggatgccaggggcctgaccagcctccccaatgctggggagcatccctggcctggggccacacctgctgccctccctctgtgtggtccaagggcaagagtggctggagccgggggactgtgctggtctgagccccacgaaggccttgggctgtggctccgaccctgctgcagaaccagcagggtgtcccctcgggcccatctgtgtcccatgtcccagcacccaggcctctctccaggtctccttttctggtcttttgccatgagggtaaccagctcttcccagctggctgggactgtcttgggtttaaaactgcaagtctcctaccctgggatcccatccagttccacacgaactagggcagtggtcactgtggcacccaggtgtgggcctggctagctgggggccttcatgtgcccttcatgcccctccctgcattgaggccttgtggacccctgggctggctgtgttcatccccgctgcaggtcgggcgtctccccccgtgccactcctgagactccaccgttacccccaggagatcctggactgcctgactcccctccccagactggcttgggagcctgggccccatggtagatgcaagggaaacctcaaggccagctcaatgcctggtatctgcccccagtccaggccaggcggaggggaggggctgtccggctgcctctcccttctcggtggcttcccctgcgccctgggagtttgatctcttaagggaacttgcctctccctcttgttttgctcctgccctgcccctaggtctgggtggcagtggccccatagcctctggaactgtgcgttctgcatagaattcaaacgagattcacccagcgcgaggaggaagaaacagcagttcctgggaaccacaattatggggggtggggggtgtgatctgagtgcctcaagatggttttcaaaaaattttttttaaagaaaataattgtatacgtgtcaacacagctggctggatgattgggactttaaaacgaccctctttcaggtggattcagagacctgtcctgtatataacagcactgtagcaataaacgtgacattttataaag

SEQ ID NO: 328 - DNA, 8332 bp, Homo sapiens
gtgtgtggatgtgtgagtgagagggaacgagagtaagagaaagaaagaagtgaggggatgtaaactcgaataaatttcaaagtgcctccgagggatgcaacgggcaaaaactgaactgttcaggcttcagattgtaactgacgatctgaggaaaaatgaggtgctcgatgaattttcgtttgtattttttggcgaggcgggggaggtgttgagattttttttttttcccctcggggtgggtgcgagggggatgcatcctagcctgcccgacccggagcaagtcgcgtctccccgccggagcccccccacccatttctttgctgaacttgcaattccgtgcgcctcggcgtgtttccccctccccccttccctccgtcccctcccctccccggagaagagagttggtgttaagagtcagggatcttggctgtgtgtctgcggatctgtagtggcggcggcggcggcggcggcggggaggcagcaggcgcgggagcgggcgcaggagcaggcggcggcggtggcggcggcggttagacatgaacgccgcctcggcgccggcggtgcacggagagccccttctcgcgcgcgggcggtttgtgtgattttgctaaaatgcatcaccaacagcgaatggctgccttagggacggacaaagagctgagtgatttactggatttcagtgcgatgttttcacctcctgtgagcagtgggaaaaatggaccaacttctttggcaagtggacattttactggctcaaatgtagaagacagaagtagctcagggtcctgggggaatggaggacatccaagcccgtccaggaactatggagatgggactccctatgaccacatgaccagcagggaccttgggtcacatgacaatctctctccaccttttgtcaattccagaatacaaagtaaaacagaaaggggctcatactcatcttatgggagagaatcaaacttacagggttgccaccagcagagtctccttggaggtgacatggatatgggcaacccaggaaccctttcgcccaccaaacctggttcccagtactatcagtattctagcaataatccccgaaggaggcctcttcacagtagtgccatggaggtacagacaaagaaagttcgaaaagttcctccaggtttgccatcttcagtctatgctccatcagcaagcactgccgactacaatagggactcgccaggctatccttcctccaaaccagcaaccagcactttccctagctccttcttcatgcaagatggccatcacagcagtgacccttggagctcctccagtgggatgaatcagcctggctatgcaggaatgttgggcaactcttctcatattccacagtccagcagctactgtagcctgcatccacatgaacgtttgagctatccatcacactcctcagcagacatcaattccagtcttcctccgatgtccactttccatcgtagtggtacaaaccattacagcacctcttcctgtacgcctcctgccaacgggacagacagtataatggcaaatagaggaagcggggcagccggcagctcccagactggagatgctctggggaaagcacttgcttcgatctattctccagatcacactaacaacagcttttcatcaaacccttcaactcctgttggctctcctccatctctctcagcaggcacagctgtttggtctagaaatggaggacaggcctcatcgtctcctaattatgaaggacccttacactctttgcaaagccgaattgaagatcgtttagaaagactggatgatgctattcatgttctccggaaccatgcagtgggcccatccacagctatgcctggtggtcatggggacatgcatggaatcattggaccttctcataatggagccatgggtggtctgggctcagggtatggaaccggccttctttcagccaacagacattcactcatggtggggacccatcgtgaagatggcgtggccctgagaggcagccattctcttctgccaaaccaggttccggttccacagcttcctgtccagtctgcgacttcccctgacctgaacccaccccaggacccttacagaggcatgccaccaggactacaggggcagagtgtctcctctggcagctctgagatcaaatccgatgacgagggtgatgagaacctgcaagacacgaaatcttcggaggacaagaaattagatgacgacaagaaggatatcaaatcaattactaggtcaagatctagcaataatgacgatgaggacctgacaccagagcagaaggcagagcgtgagaaggagcggaggatggccaacaatgcccgagagcgtctgcgggtccgtgacatcaacgaggctttcaaagagctcggccgcatggtgcagctccacctcaagagtgacaagccccagaccaagctcctgatcctccaccaggcggtggccgtcatcctcagtctggagcagcaagtccgagaaaggaatctgaatccgaaagctgcgtgtctgaaaagaagggaggaagagaaggtgtcctcagagcctccccctctctccttggccggcccacaccctggaatgggagacgcatcgaatcacatgggacagatgtaaaagggtccaagttgccacattgcttcattaaaacaagagaccacttccttaacagctgtattatcttaaacccacataaacacttctccttaacccccatttttgtaatataagacaagtctgagtagttatgaatcgcagacgcaagaggtttcagcattcccaattatcaaaaaacagaaaaacaaaaaaaagaaagaaaaaagtgcaacttgagggacgactttctttaacatatcattcagaatgtgcaaagcagtatgtacaggctgagacacagcccagagactgaacggcaatctttccacactgtggaacaatgcatttgtgcctaaacttcttttggaaaaaaaaaatataattaatttgtaagtctgaaaaaaaaatatttaatttaaaaaaaattgtaaacttgcaataatgaaaaagtgtacttctgaagaaaactacatgaacgtttttgttggtattcaagtcagctagtgtttataattactggatattgaattaggggaagctcggctgccctagtaacaaaaccagcaaacgtcctgatgacaacgaagtgatgacattagccattccttagggtaggaggaacagatggatcttatagacctatgacaaatatatatataaatatatatataaatatatattaaaaatttagtgactatggtaagcttttgttcatttgtttcagacttttttctcctgtaaaaaaatagtactgattaacttttttaaaagaaagattttactgtaaatatggatttttttttttttggtcttatttctgtccctttccctggtttgttatcgtaacctgtagtgccaactctgcttccagaggggtagtgcaggatgaaatgctgaccctgatgttgcttctcattcataaataagtagaaagttgtttctccagtcttttgggaacacaggacttaaaagtcacatcatgtgtagatattacaagcagcattaccaagacatggcaaaaagagtttgtctgaattgtaatgttgcgtttgtgaacctattctgggattttcagaggtacaaggttagaatgctacaatgttaccactgtgccttccaatgtttatatcatcggaaacataacataatcaaagtggctgtgatttaacaaaatgattaaagtgttacctacctgtgtagccgaagtagtgtgcagtgaggcgtttctgaatacatggtcagatttttggaaaaaaacaaaaacaaaaaaaacaagtaaagttcaaaaaccgtcaaatgagaaaattgcaagtagtgtgacagagctgattgattttgttgctttcttgattttttttttcaaaatgggtttactaaaatgtagatgacttaactgcctcctccttcgtctgaaaaatgccaatattcaatcatcatgcagcattataacaagccttataagtcctaaagcattaagttgcacttttttgaggaggggtagtgcagtatttctctggccagtatgaatgaagtttatacttaccatatttgatagaaacatagatcaagctatggcacagcgactcatcagatagctagctttgacgtctgggcacaattgaaccaacttccatcgtgaatctttataatgattgactttggtgtatagtgcagtaaacaaatagtgctcctagttaagtatttgtcagcatccttttgtctctaacttgtttctatttttacagccacacaattcttggcatgtattaagaaaaaaaaaaatccctgttcaagtagtttttccacctatcagcactgagtaaatgccataaatccattgaaatggtctaaatgttccatctgttctcctgttttgccagttatatagtaatgaaatacatttgtaaattttatgcaacaaatggcaaacgtatcattattttgaaattgtgtatgtaaaagttatatttttacatgtagactcttgttattatgtgttttaatacattgtatcagtttttgtttttttttaaaaactgtggtttaaaaagaagtctcatttaaatgaaatagctacaagaatcagaattttatgttcatttctgaaaatgtaagaacaaataagatagttaccacgtggtcatcttttacaaacccataaacattttgattagctgtgtgtgtgttgaaaaactgtaaatatgttcagtagcgataaaactaaaataactttgatttgttgataagttcctaaaatgtggaggtggattaaaaccttaggagaatagcagaaatcaaacttcatgaaaagttattttggggctttcctgtgaaatgtatgaacaaagaggctcagagaaggacatggaagacaataatgtatactctctcctcctccctgaataatgaaaaccatgtgtatttgttccctccgtatgttaaagatttccttttagtggtacattctgcactcattttgtatagtctaccaaggcgggtatccctaggaacaatattatataggaagcaggtatactctgatcacattcaggataagtgtacagaagaaaatacggtgtttactctttagggaactggaaacactccctgcattgatgtacattttaagaatggcacttttgatacatgttatcataaaggtgcttaatagagctgaattaaagtttttcaaatctgtaaacaaagcaaaaaagtaaattgtagtcatttgattattttttaaattggtgctttatattttgttctcactcagagtaaaagctgcaatttattgttcaccagctttgatgtattcattactcagtaatgcaatacctctattgttgaattccctttggaaataagtgaaaattctaacggccactgaaagctgctcgctaggttttgcttggtggagaaacataatctgcacctatccatattaattgggttgtatccccattaaaaaagaaaaaaagggaatgtggcctttttagtgtgttttttattgttgttgttttgtaattatcaaacccaggtaagatattggtatcctgcactggattttcaaatgaagttcagcagaagacagttaagattaaagtactatacaaaaatttcaaaagggtccatactacgctatctgtatgacgacacttaggctggggatctctttcagaaactcggactttaaaagcaacttggagcagttgatccacctccacattcaagtaatttatgaatatgcagaatagggatctgttcatctagaaatttttaccatttgtcttctgtgtagctgcaaggaacactaatgtttatacaactgtcagtccacccagtggtgcaactggttctgattcagtcttccgattcctttttatttttcactttttcctatttctgaatttttttttttatttgtgatcttgattttgatgaggggttggggagtggggagggagtcgaaccaagacttggagttaagaggattttcatcttttgcatccaacaggcagaatatgatctgtgtccaaaagtgaacttgagtcaggaatgaatcaatttcagcataaacaagcacaaaaatttagtctgctggctgactggaagcaaaaaagtcaagatggaatatgatgaattccaacacaatggggcaccaaggcctttaggcctctctttttattttgctttggttttgtttgtttttctttagagacatgctctttctcatgggacttgaagtggactcatctttgtgcagtgctggttttgccatactcatttcaagtattatagacatatgtaatggtgaaaatatatgaactgtggcctttttcattcttgttacttgtgatgcaattaagtgaagataagaaaaaaaaaaaaaaagcagagatttaccatgtatcagtgcctggctttttgttataaagctttgtttgtctagtgctcttttgctataaaatagactgtagtacaccctagtaggaaaaaaaaaaaactaaatttaaaaataaaaaatatatttggcttatttttcgcaggagcaatccttttataccatgaatattacaaaaaaattgtcagattctgaatatttcttctttgtagatttttggaatcattatgagtaaaagtttgttactttattttactatttaaaagatgttattttaccatgtgttaccaagatgaaactgtatgggtagcttttttgtttgttttttgttttgtttttgtttttgtttttgtttttagttgtaggtcgcagcggggaaattttttgcgactgtacacatagctgcagcattaaaaacttaaaaaaattgttaaaaaaaaaaaaagggaaaacatttcaaaaaaaaaaaaaaagataaacagttacaccttgttttcaatgtgtggctgagtgcctcgattttttcatgtttttggtgtatttctgatttgtagaagtgtccaaacaggttgtgtgctggagttccttcaagacaaaaacaaacccagcttggtcaaggccattacctgtttcccatctgtagttattcgatgaagtcatgtacatgaccgttctgtagcaataaatgtgccatttttataaactgtttctgacacttgtttcatttcattttgcattgtccatatagctatgattctcttctgtaagtaaaacgcatctatatttcattttccaagtgttggaggtattgacagcttaacaaacaaaacatacaaaaaaaatcacaaaaacaaattgaaaagcaaagcacatgattgatcaaggaagagatgcccttaatgaaaatggaacgggatgcatgcaaaacaaaaagaaaactgtctagaggattaactaattgaaggaatataattaatgtgtgtgtaacactgaagctatgcatttgaagagctctgaactgcaccagtgttttcggttgtgctgcaggttgctaagtcaagtcagccttaaccttttgcaccagttggtcggctgtttggcagaacattctcagatcttttcagtcaaaaatctaagatgatttattttgtatcactttgttaaaagctgaatattgttaactacagttaatattaacactgtatttatactttctcaaactacatccgccccaccacttctggttgcctctgttgactattaatccagatgtaaacaaccagatgtttttttctaacttgtacaaactgacgtgtgtcaactatcatggaaggaaaaaaatgtacagattaaaattattcagtgttatgtactgtaagttaatatttttgtagaatggacatcaatctactttgcaaaatttggaggctatttcaacattgcactgtagaaatgtaaagtaatgtatgcaatgtaaaggaaagcccgcggtagctgagcgcttcataacagaatgttctaatcaagtacgtggtatttggggatgtctccaatattgctcttgtattctttctaattgggtttagtgactagttgaaggaaaatgttataacgccatttggttcacatgtgaagtgccctccatagccaaatgttgggatttttttttttttcgtttttggttggactgtttgcagatatttaaattttatgaaatttccaaagattttggttgataacccccttttaccttctaaatgatttgagatgttcttatgttcttactgtgtgttttaaatatatataaaagagccacaagcattt

SEQ ID NO: 329 - DNA, 3283 bp, Homo sapiens
cccgccagctcgcggagccgctctgccccgcgccctagcccgcgcctgcagcccgcccaggcggagtcagcccgcgctccgcccgccgcgatccgagctcggaggttcggactccgggctcgccgccccccgggccggctccgcgccccgcactcccggcgcccagcgccccgcgccccggcgggcggagcgcaccatgccgcagctggactccggcgggggcggcgcgggcggcggcgacgacctcggcgcgccggacgagctgctggccttccaggatgaaggcgaggagcaggacgacaagagccgcgacagcgccgccggtcccgagcgcgacctggccgagctcaagtcgtcgctcgtgaacgagtccgagggcgcggccggcggcgcagggatcccgggggtcccgggggccggcgccggggcccgcggcgaggccgaggctctcgggcgggaacacgctgcgcagagactcttcccggacaaacttccagagcccctggaggacggcctgaaggccccggagtgcaccagcggcatgtacaaagagaccgtctactccgccttcaatctgctcatgcattacccacccccctcgggagcagggcagcacccccagccgcagcccccgctgcacaaggccaatcagcccccccacggtgtcccccaactctctctctacgaacatttcaacagcccacatcccacccctgcacctgcggacatcagccagaagcaagttcacaggcctctgcagacccctgacctctctggcttctactccctgacctcaggcagcatggggcagctcccccacactgtgagctggttcacccacccatccttgatgctaggttctggtgtacctggtcacccagcagccatcccccacccggccattgtgcccccctcagggaagcaggagctgcagcccttcgaccgcaacctgaagacacaagcagagtccaaggcagagaaggaggccaagaagccaaccatcaagaagcccctcaatgccttcatgctgtacatgaaggagatgagagccaaggtcattgcagagtgcacacttaaggagagcgctgccatcaaccagatcctgggccgcaggtggcacgcgctgtcgcgagaagagcaggccaagtactatgagctggcccgcaaggagaggcagctgcacatgcagctatacccaggctggtcagcgcgggacaactacgggaagaagaagaggcggtcgagggaaaagcaccaagaatccaccacaggaggaaaaagaaatgcattcggtacttacccggagaaggccgctgccccagccccgttccttccgatgacagtgctctaggctgccccgggtccccagctccccaggactcaccctcataccatctgctgccccgcttccccacagaactgcttactagccctgcggagccggcacctacatccccaggtctctccactgctctcagcctcccaaccccagggcccccacaggccccccgcagcaccctgcagagcacacaggtacagcaacaggaatctcagagacaggtggcctagcaggcacaggacacctggccgcctccaggagcctaccccctgaaagtgacagagacccagatctcatggaaactggccaggggtcctgttaacgtcatctcagggtccagaccctgaagatttcagaggctgcaggacttctgcctgaacctggggtcatcgattcaaactgctccaagtggtgggaatcagatctgtcttgatgtgtcatctaattaagggaatcccttgtacctatggctgcctgcatctattctttgtaccatctgtcttgccagccagaagcctctgcctccctagcttttctgctataggtcagagatgggctgaactgagcctagctaccttctctacccatctcccccatcccccactgccacaccctccccattcagacacttcatggaccaagaatgagctggtttgtcaaacaacatgtgagcatggtcacaagcacaaagctcaagatgacagctcttctaaggaaatggagaagctctgtttataaaaacaaaaacaaaaccagctgctactcataagttggaccagaggaagccccttactatgatctcaggagcttgcaagaagcaggaaggggaatggaataggttaagtttaggcctatcaacctaagcaacagaaataatctgacactaccttatcaggcaaattggggaggggagggtgtatctagctctagttcaaattatttggaagtgttccctgagaaacccaccagcctaagaagctctggccccaggcttgtcactagcagctgcagtcaacagttcaaagaagtcatggcccaaatccagtgtgcacccctccccattcacagagcctttttcacaattccatttccagttcatctatggcagtccagccagctcctgggcagcttgagagggcaaacccaaaacctcatgacagccagagcctgtctttcagcattcagtccgcctggccggctccagtttccccatggggctgcgggacagaggaccattacaactagatcaaggagcccagaaaacctccagtagtggacaacaggttttcaccatagcctacgttaacccatttttgagccaagcttcaaccctcagccttgaaaaacaagtctttaatttaatttttgttttttgcctaaatccaaagaaaaagggctgccgggccaggcgcggtggctcacgcctgtaatcccagcactttggcaggccgaggcaggtggatcacctgacgtcagtagtttgagaccagcctggccaacatggtgaaaccctgtatctactaaaaatacaaaaattagccggacgtggtggtgcgcgcatgtaatcccagctactcgggaggctgaggcggaagaatcacttgaacccgggaggcggaggttccagtgagccgagatggcgctattgcactccagtctgggtaacagggagactgcatctcaaaaaaaaaaaaaaaaaaaaaaaagggctgtccatgtattcacacacccctcaaaaaaagcctttagttcctactttagccactggtttctcagaatccaaagatcacatattctagtgtaacactgcaagaagtcttgagaaaaagattattgtagtgttcaaaatatttttgtattgttaatgcatcatcatagaaaaacttttaaacatgagaataaagatactttttactgggtttgtttttcaaagcctgaaaaaaa

SEQ ID NO: 330 - DNA, 2779 bp, Homo sapiens
gcgccgggccgggccgggcagggcgcgggcggctaggggctccgagagcggcggccccggcccgcggccccaccatgccccagctcggcggcgggggcggcggcggcggcggcggcagcgggggaggcggcggctccagcgccggggcggccggcggaggggacgacctcggggcgaacgacgagctgatccccttccaggacgaggggggcgaggagcaggagccgagcagcgatagcgcctcggcgcagcgggacctagacgaggtcaagtcgtccctggtcaacgagtcggagaaccagagcagcagctcggactcggaggcggagaggcgcccgcagcccgtccgggacactttccagaagccgcgggactatttcgccgaagtgagaaggcctcaggacagcgcgttctttaaaggacccccgtaccctgggtaccccttcctgatgatcccggacctgagcagcccgtacctctccaacggacccctgtctcccggaggagcgcgcacctacctgcagatgaaatggcccctcctcgatgtcccctccagcgccacagtcaaggacacgaggtcaccatctccagcacacttgtctaataaagttcctgtcgttcagcacccgcatcacatgcatccgctgactcccctcatcacctacagcaatgaccacttctcccccggctcccctcccacccacctctccccagagatcgatccaaagacaggaatcccccggccccctcacccatccgagctgtcaccgtattacccactctctcccggagctgtcggacaaatcccccaccccctcggctggctcgtcccacagcaaggccagcccatgtactcccttcctcccggtggcttccggcacccttaccccgccctcgccatgaacgcctcgatgtccagcctggtctccagtcggttctctcctcacatggtggctcctgcccaccctggcctgcccacctcagggatcccccaccctgccatcgtctcccccatcgtcaagcaggaaccggcaccccccagcctgagccctgcagtgagcgtgaaatcaccagtcaccgtgaaaaaggaggaggaaaagaagccccacgtgaagaagcctctgaatgccttcatgttgtatatgaaggagatgagggccaaggtggtggctgagtgcaccctgaaggaaagtgcagccattaaccagatccttggaagaaagtggcacaacctgtctcgagaagaacaggccaagtactacgagctggcccggaaggagcggcagcttcactcgcagctctacccaacctggtcagcccgggacaactatggtaagaaaaagaagaggaagagagaaaagcagctgtcccagacacagtcacagcagcaagtccaggaggcagagggtgccctggcctccaagagcaagaagccatgtgttcagtacctgccccccgagaagccctgtgacagccctgcctcctcccacgggagcatgctggactccccggccactccctctgcagctttggcctcaccagctgcccctgctgccacccattcggagcaagcccagcccctctccctcaccaccaaaccagaaacccgggcccagctggctctccactctgccgccttcctgtcggctaaggctgcagcctcctcctctgggcagatgggcagccagcctcccctcctgtcccggcccctcccccttgggtccatgcccacagctctgctggcctctcccccgtccttccccgccacgctccatgcccaccaggccctcccggtgctacaggcccagcctctttccctggtcaccaagtctgcccactaagctccccccgacccctgcaggctgtcacatgactcattgagtagtaatgattcagaagaaaaagaaaaaggagactttattggtcaatatttgaccactctggactgttctgtaaagtggctggtaacaacagcactttacagtttgtagatgtaaccagtagctgatcttaaggcttttttaaaaaacaaaacaaaacaacaaaaaaaaatctttataagaaagagaactgaaaagtagcgtgctattcgtcctgtaggtgctgtggtggatggacctgggcagagggcacttctctctcttacctctcttgcactttctgtctcctgtctcttctcgcccctgccgcctgccccagcttccccgactccatctgcagctctgccattgtgacatttcctgttacccagcccaagttttcatcgtctgctcaataccgtgggttcttcttcgtcctctgtcctctgcccagtgtgaggccatcaccatgtgagaagacatcttggcctgatttgctgccaccagcgtcccctccctcagtgggcccgaactcgccagccccagctttcagtggagaaagcggtcctctgaaatggtttcctcccaacccccgcatttaaagggactcaaggtgcctgccacttcctcagcgaagaagtctgtgttcctccccgtccttgccagtggcgatcatcccttcacaatcccagagtggcaggcgggaccagccccatggtctggctcctgtcacctgggtccgtgccagcacaatctgccaaagttctagagaccctgttcccttccccatcacctcacatgcttcttctgtgtgtatttctttttgtttttatggtttttggagcaatttaaactcccagttgtttattttcacaaaagaaaataaaattgcagttgcaagaaaaaaaaaaaaaaaaaaa

SEQ ID NO: 331 - DNA, 2439 bp, Homo sapiens
ttttttttttttaccccccttttttatttattatttttttgcacattgagcggatccttgggaacgagagaaaaaagaaacccaaactcacgcgtgcagaagatctccccccccttcccctcccctcctccctcttttcccctccccaggagaaaaagacccccaagcagaaaaaagttcaccttggactcgtctttttcttgcaatattttttgggggggcaaaactttgagggggtgattttttttggcttttcttcctccttcatttttcttccaaaattgctgctggtgggtgaaaaaaaaatgccgcagctgaacggcggtggaggggatgacctaggcgccaacgacgaactgatttccttcaaagacgagggcgaacaggaggagaagagctccgaaaactcctcggcagagagggatttagctgatgtcaaatcgtctctagtcaatgaatcagaaacgaatcaaaacagctcctccgattccgaggcggaaagacggcctccgcctcgctccgaaagtttccgagacaaatcccgggaaagtttggaagaagcggccaagaggcaagatggagggctctttaaggggccaccgtatcccggctaccccttcatcatgatccccgacctgacgagcccctacctccccaacggatcgctctcgcccaccgcccgaacctatctccagatgaaatggccactgcttgatgtccaggcagggagcctccagagtagacaagccctcaaggatgcccggtccccatcaccggcacacattgtctctaacaaagtgccagtggtgcagcaccctcaccatgtccaccccctcacgcctcttatcacgtacagcaatgaacacttcacgccgggaaacccacctccacacttaccagccgacgtagaccccaaaacaggaatcccacggcctccgcaccctccagatatatccccgtattacccactatcgcctggcaccgtaggacaaatcccccatccgctaggatggttagtaccacagcaaggtcaaccagtgtacccaatcacgacaggaggattcagacacccctaccccacagctctgaccgtcaatgcttccgtgtccaggttccctccccatatggtcccaccacatcatacgctacacacgacgggcattccgcatccggccatagtcacaccaacagtcaaacaggaatcgtcccagagtgatgtcggctcactccatagttcaaagcatcaggactccaaaaaggaagaagaaaagaagaagccccacataaagaaacctcttaatgcattcatgttgtatatgaaggaaatgagagcaaaggtcgtagctgagtgcacgttgaaagaaagcgcggccatcaaccagatccttgggcggaggtggcatgcactgtccagagaagagcaagcgaaatactacgagctggcccggaaggagcgacagcttcatatgcaactgtaccccggctggtccgcgcgggataactatggaaagaagaagaagaggaaaagggacaagcagccgggagagaccaatgaacacagcgaatgtttcctaaatccttgcctttcacttcctccgattacagacctcagcgctcctaagaaatgccgagcgcgctttggccttgatcaacagaataactggtgcggcccttgcaggagaaaaaaaaagtgcgttcgctacatacaaggtgaaggcagctgcctcagcccaccctcttcagatggaagcttactagattcgcctcccccctccccgaacctgctaggctcccctccccgagacgccaagtcacagactgagcagacccagcctctgtcgctgtccctgaagcccgaccccctggcccacctgtccatgatgcctccgccacccgccctcctgctcgctgaggccacccacaaggcctccgccctctgtcccaacggggccctggacctgcccccagccgctttgcagcctgccgccccctcctcatcaattgcacagccgtcgacttcttggttacattcccacagctccctggccgggacccagccccagccgctgtcgctcgtcaccaagtctttagaatagctttagcgtcgtgaaccccgctgctttgtttatggttttgtttcacttttcttaatttgccccccacccccaccttgaaaggttttgttttgtactctcttaattttgtgccatgtggctacattagttgatgtttatcgagttcattggtcaatatttgacccattcttatttcaatttctccttttaaatatgtagatgagagaagaacctcatgattggtaccaaaatttttatcaacagctgtttaaagtctttgtagcgtttaaaaaatatatatatatacataactgttatgtagttcggatagcttagttttaaaagactgattaaaaaacaaaaa

SEQ ID NO: 332 - DNA, 2346 bp, Homo sapiens
ccttcgcgccctgggccatctccctcccacctccctccgcggagcagccagacagcgagggccccggccgggggcaggggggacgccccgtccggggcacccccccggctctgagccgcccgcggggccggcctcggcccggagcggaggaaggagtcgccgaggagcagcctgaggccccagagtctgagacgagccgccgccgcccccgccactgcggggaggagggggaggaggagcgggaggagggacgagctggtcgggagaagaggaaaaaaacttttgagacttttccgttgccgctgggagccggaggcgcggggacctcttggcgcgacgctgccccgcgaggaggcaggacttggggaccccagaccgcctccctttgccgccggggacgcttgctccctccctgccccctacacggcgtccctcaggcgcccccattccggaccagccctcgggagtcgccgacccggcctcccgcaaagacttttccccagacctcgggcgcaccccctgcacgccgccttcatccccggcctgtctcctgagcccccgcgcatcctagaccctttctcctccaggagacggatctctctccgacctgccacagatcccctattcaagaccacccaccttctggtaccagatcgcgcccatctaggttatttccgtgggatactgagacacccccggtccaagcctcccctccaccactgcgcccttctccctgaggacctcagctttccctcgaggccctcctaccttttgccgggagacccccagcccctgcaggggcggggcctccccaccacaccagccctgttcgcgctctcggcagtgccggggggcgccgcctcccccatgccgccctccgggctgcggctgctgccgctgctgctaccgctgctgtggctactggtgctgacgcctggccggccggccgcgggactatccacctgcaagactatcgacatggagctggtgaagcggaagcgcatcgaggccatccgcggccagatcctgtccaagctgcggctcgccagccccccgagccagggggaggtgccgcccggcccgctgcccgaggccgtgctcgccctgtacaacagcacccgcgaccgggtggccggggagagtgcagaaccggagcccgagcctgaggccgactactacgccaaggaggtcacccgcgtgctaatggtggaaacccacaacgaaatctatgacaagttcaagcagagtacacacagcatatatatgttcttcaacacatcagagctccgagaagcggtacctgaacccgtgttgctctcccgggcagagctgcgtctgctgaggctcaagttaaaagtggagcagcacgtggagctgtaccagaaatacagcaacaattcctggcgatacctcagcaaccggctgctggcacccagcgactcgccagagtggttatcttttgatgtcaccggagttgtgcggcagtggttgagccgtggaggggaaattgagggctttcgccttagcgcccactgctcctgtgacagcagggataacacactgcaagtggacatcaacgggttcactaccggccgccgaggtgacctggccaccattcatggcatgaaccggcctttcctgcttctcatggccaccccgctggagagggcccagcatctgcaaagctcccggcaccgccgagccctggacaccaactattgcttcagctccacggagaagaactgctgcgtgcggcagctgtacattgacttccgcaaggacctcggctggaagtggatccacgagcccaagggctaccatgccaacttctgcctcgggccctgcccctacatttggagcctggacacgcagtacagcaaggtcctggccctgtacaaccagcataacccgggcgcctcggcggcgccgtgctgcgtgccgcaggcgctggagccgctgcccatcgtgtactacgtgggccgcaagcccaaggtggagcagctgtccaacatgatcgtgcgctcctgcaagtgcagctgaggtcccgccccgccccgccccgccccggcaggcccggccccaccccgccccgcccccgctgccttgcccatgggggctgtatttaaggacacccgtgccccaagcccacctggggccccattaaagatggagagaggactgcggatctctgtgtcattgggcgcctgcctggggtctccatccctgacgttcccccactcccactccctctctctccctctctgcctcctcctgcctgtctgcactattcctttgcccggcatcaaggcacaggggaccagtggggaacactactgtagttagatc

SEQ ID NO: 333 - DNA, 1695 bp, Homo sapiens
caagcaggatacgtttttctgttgggcattgactagattgtttgcaaaagtttcgcatcaaaaacaaacaacaacaacaaaaaaccaaacaactctccttgatctatactttgagaattgttgatttctttttttttattctgacttttaaaaacaacttttttttccacttttttaaaaaatgcactactgtgtgctgagcgcttttctgatcctgcatctggtcacggtcgcgctcagcctgtctacctgcagcacactcgatatggaccagttcatgcgcaagaggatcgaggcgatccgcgggcagatcctgagcaagctgaagctcaccagtcccccagaagactatcctgagcccgaggaagtccccccggaggtgatttccatctacaacagcaccagggacttgctccaggagaaggcgagccggagggcggccgcctgcgagcgcgagaggagcgacgaagagtactacgccaaggaggtttacaaaatagacatgccgcccttcttcccctccgaaaatgccatcccgcccactttctacagaccctacttcagaattgttcgatttgacgtctcagcaatggagaagaatgcttccaatttggtgaaagcagagttcagagtctttcgtttgcagaacccaaaagccagagtgcctgaacaacggattgagctatatcagattctcaagtccaaagatttaacatctccaacccagcgctacatcgacagcaaagttgtgaaaacaagagcagaaggcgaatggctctccttcgatgtaactgatgctgttcatgaatggcttcaccataaagacaggaacctgggatttaaaataagcttacactgtccctgctgcacttttgtaccatctaataattacatcatcccaaataaaagtgaagaactagaagcaagatttgcaggtattgatggcacctccacatataccagtggtgatcagaaaactataaagtccactaggaaaaaaaacagtgggaagaccccacatctcctgctaatgttattgccctcctacagacttgagtcacaacagaccaaccggcggaagaagcgtgctttggatgcggcctattgctttagaaatgtgcaggataattgctgcctacgtccactttacattgatttcaagagggatctagggtggaaatggatacacgaacccaaagggtacaatgccaacttctgtgctggagcatgcccgtatttatggagttcagacactcagcacagcagggtcctgagcttatataataccataaatccagaagcatctgcttctccttgctgcgtgtcccaagatttagaacctctaaccattctctactacattggcaaaacacccaagattgaacagctttctaatatgattgtaaagtcttgcaaatgcagctaaaattcttggaaaagtggcaagaccaaaatgacaatgatgatgataatgatgatgacgacgacaacgatgatgcttgtaacaagaaaacataagagagccttggttcatcagtgttaaaaaatttttgaaaaggcggtactagttcagacactttggaagtttgtgttctgtttgttaaaactggcatctgacacaaaaaaagttgaaggccttattctacatttcacctactttgtaagtgagagagacaagaagcaaatttttttaaa

SEQ ID NO: 334 - DNA, 2574 bp, Homo sapiens
cctgtttagacacatggacaacaatcccagcgctacaaggcacacagtccgcttcttcgtcctcagggttgccagcgcttcctggaagtcctgaagctctcgcagtgcagtgagttcatgcaccttcttgccaagcctcagtctttgggatctggggaggccgcctggttttcctccctccttctgcacgtctgctggggtctcttcctctccaggccttgccgtccccctggcctctcttcccagctcacacatgaagatgcacttgcaaagggctctggtggtcctggccctgctgaactttgccacggtcagcctctctctgtccacttgcaccaccttggacttcggccacatcaagaagaagagggtggaagccattaggggacagatcttgagcaagctcaggctcaccagcccccctgagccaacggtgatgacccacgtcccctatcaggtcctggccctttacaacagcacccgggagctgctggaggagatgcatggggagagggaggaaggctgcacccaggaaaacaccgagtcggaatactatgccaaagaaatccataaattcgacatgatccaggggctggcggagcacaacgaactggctgtctgccctaaaggaattacctccaaggttttccgcttcaatgtgtcctcagtggagaaaaatagaaccaacctattccgagcagaattccgggtcttgcgggtgcccaaccccagctctaagcggaatgagcagaggatcgagctcttccagatccttcggccagatgagcacattgccaaacagcgctatatcggtggcaagaatctgcccacacggggcactgccgagtggctgtcctttgatgtcactgacactgtgcgtgagtggctgttgagaagagagtccaacttaggtctagaaatcagcattcactgtccatgtcacacctttcagcccaatggagatatcctggaaaacattcacgaggtgatggaaatcaaattcaaaggcgtggacaatgaggatgaccatggccgtggagatctggggcgcctcaagaagcagaaggatcaccacaaccctcatctaatcctcatgatgattcccccacaccggctcgacaacccgggccaggggggtcagaggaagaagcgggctttggacaccaattactgcttccgcaacttggaggagaactgctgtgtgcgccccctctacattgacttccgacaggatctgggctggaagtgggtccatgaacctaagggctactatgccaacttctgctcaggcccttgcccatacctccgcagtgcagacacaacccacagcacggtgctgggactgtacaacactctgaaccctgaagcatctgcctcgccttgctgcgtgccccaggacctggagcccctgaccatcctgtactatgttgggaggacccccaaagtggagcagctctccaacatggtggtgaagtcttgtaaatgtagctgagaccccacgtgcgacagagagaggggagagagaaccaccactgcctgactgcccgctcctcgggaaacacacaagcaacaaacctcactgagaggcctggagcccacaaccttcggctccgggcaaatggctgagatggaggtttccttttggaacatttctttcttgctggctctgagaatcacggtggtaaagaaagtgtgggtttggttagaggaaggctgaactcttcagaacacacagactttctgtgacgcagacagaggggatggggatagaggaaagggatggtaagttgagatgttgtgtggcaatgggatttgggctaccctaaagggagaaggaagggcagagaatggctgggtcagggccagactggaagacacttcagatctgaggttggatttgctcattgctgtaccacatctgctctagggaatctggattatgttatacaaggcaagcatttttttttttaaagacaggttacgaagacaaagtcccagaattgtatctcatactgtctgggattaagggcaaatctattacttttgcaaactgtcctctacatcaattaacatcgtgggtcactacagggagaaaatccaggtcatgcagttcctggcccatcaactgtattgggccttttggatatgctgaacgcagaagaaagggtggaaatcaaccctctcctgtctgccctctgggtccctcctctcacctctccctcgatcatatttccccttggacacttggttagacgccttccaggtcaggatgcacatttctggattgtggttccatgcagccttggggcattatgggtcttcccccacttcccctccaagaccctgtgttcatttggtgttcctggaagcaggtgctacaacatgtgaggcattcggggaagctgcacatgtgccacacagtgacttggccccagacgcatagactgaggtataaagacaagtatgaatattactctcaaaatctttgtataaataaatatttttggggcatcctggatgatttcatcttctggaatattgtttctagaacagtaaaagccttattctaaggtg

SEQ ID NO: 335 - DNA, 6475 bp, Homo sapiens
ggcgaggcgaggtttgctggggtgaggcagcggcgcggccgggccgggccgggccacaggcggtggcggcgggaccatggaggcggcggtcgctgctccgcgtccccggctgctcctcctcgtgctggcggcggcggcggcggcggcggcggcgctgctcccgggggcgacggcgttacagtgtttctgccacctctgtacaaaagacaattttacttgtgtgacagatgggctctgctttgtctctgtcacagagaccacagacaaagttatacacaacagcatgtgtatagctgaaattgacttaattcctcgagataggccgtttgtatgtgcaccctcttcaaaaactgggtctgtgactacaacatattgctgcaatcaggaccattgcaataaaatagaacttccaactactgtaaagtcatcacctggccttggtcctgtggaactggcagctgtcattgctggaccagtgtgcttcgtctgcatctcactcatgttgatggtctatatctgccacaaccgcactgtcattcaccatcgagtgccaaatgaagaggacccttcattagatcgcccttttatttcagagggtactacgttgaaagacttaatttatgatatgacaacgtcaggttctggctcaggtttaccattgcttgttcagagaacaattgcgagaactattgtgttacaagaaagcattggcaaaggtcgatttggagaagtttggagaggaaagtggcggggagaagaagttgctgttaagatattctcctctagagaagaacgttcgtggttccgtgaggcagagatttatcaaactgtaatgttacgtcatgaaaacatcctgggatttatagcagcagacaataaagacaatggtacttggactcagctctggttggtgtcagattatcatgagcatggatccctttttgattacttaaacagatacacagttactgtggaaggaatgataaaacttgctctgtccacggcgagcggtcttgcccatcttcacatggagattgttggtacccaaggaaagccagccattgctcatagagatttgaaatcaaagaatatcttggtaaagaagaatggaacttgctgtattgcagacttaggactggcagtaagacatgattcagccacagataccattgatattgctccaaaccacagagtgggaacaaaaaggtacatggcccctgaagttctcgatgattccataaatatgaaacattttgaatccttcaaacgtgctgacatctatgcaatgggcttagtattctgggaaattgctcgacgatgttccattggtggaattcatgaagattaccaactgccttattatgatcttgtaccttctgacccatcagttgaagaaatgagaaaagttgtttgtgaacagaagttaaggccaaatatcccaaacagatggcagagctgtgaagccttgagagtaatggctaaaattatgagagaatgttggtatgccaatggagcagctaggcttacagcattgcggattaagaaaacattatcgcaactcagtcaacaggaaggcatcaaaatgtaattctacagctttgcctgaactctccttttttcttcagatctgctcctgggttttaatttgggaggtcaattgttctacctcactgagagggaacagaaggatattgcttccttttgcagcagtgtaataaagtcaattaaaaacttcccaggatttctttggacccaggaaacagccatgtgggtcctttctgtgcactatgaacgcttctttcccaggacagaaaatgtgtagtctacctttattttttattaacaaaacttgttttttaaaaagatgattgctggtcttaactttaggtaactctgctgtgctggagatcatctttaagggcaaaggagttggattgctgaattacaatgaaacatgtcttattactaaagaaagtgatttactcctggttagtacattctcagaggattctgaaccactagagtttccttgattcagactttgaatgtactgttctatagtttttcaggatcttaaaactaacacttataaaactcttatcttgagtctaaaaatgacctcatatagtagtgaggaacataattcatgcaattgtattttgtatactattattgttctttcacttattcagaacattacatgccttcaaaatgggattgtactataccagtaagtgccacttctgtgtctttctaatggaaatgagtagaattgctgaaagtctctatgttaaaacctatagtgtttgaattcaaaaagcttatttatctgggtaacccaaactttttctgttttgtttttggaagggtttttgtggtatgtcatttggtattctattctgaaaatgcctttctcctaccaaaatgtgcttaagccactaaagaaatgaagtggcattaattagtaaattattagcatggtcatgtttgaatattctcacatcaagcttttgcattttaattgtgttgtctaagtatacttttaaaaaatcaagtggcactctagatgcttatagtactttaatatttgtagcatacagactaatttttctaaaagggaaagtctgtctagctgcttgtgaaaagttatgtggtattctgtaagccatttttttctttatctgttcaaagacttattttttaagacatgaattacatttaaaattagaatatggttaatattaaataataggcctttttctaggaaggcgaaggtagttaataatttgaatagataacagatgtgcaagaaagtcacatttgttatgtatgtaggagtaaacgttcggtggatcctctgtctttgtaactgaggttagagctagtgtggttttgaggtctcactacactttgaggaaggcagcttttaattcagtgtttccttatgtgtgcgtacattgcaactgcttacatgtaatttatgtaatgcattcagtgcacccttgttacttgggagaggtggtagctaaagaacattctgagtataggtttttctccatttacagatgtctttggtcaaatattgaaagcaaacttgtcatggtcttcttacattaagttgaaactagcttataataactggtttttacttccaatgctatgaagtctctgcagggcttttacagttttcgaagtccttttatcactgtgatcttattctgaggggagaaaaaactatcatagctctgaggcaagacttcgactttatagtgctatcagttccccgatacagggtcagagtaacccatacagtattttggtcaggaagagaaagtggccatttacactgaatgagttgcattctgataatgtcttatctcttatacgtagaataaatttgaaagactatttgatcttaaaaccaaagtaattttagaatgagtgacatattacataggaatttagtgtcaatttcatgtgtttaaaaacatcatgggaaaaatgcttagaggttactattttgactacaaagttgagtttttttctgtagttaccataatttcattgaagcaaatgaatgagtttgagaggtttgtttttatagttgtgttgtattacttgtttaataataatctctaattctgtgatcaggtactttttttgtgggggttttttttttgtttttttttttttgttgttgtttttgggccatttctaagcctaccagatctgctttatgaaatccaggggaccaatgcattttatcactaaaactatttttatataattttaagaatataccaaaagttgtctgatttaaagttgtaatacatgatttctcactttcatgtaaggttatccacttttgctgaagatattttttattgaatcaaagattgagttacaattatacttttcttacctaagtggataaaatgtacttttgatgaatcagggaatttttttaaagttggagtttagttctaaattgactttacgtattactgcagttaattccttttttggctagggatggtttgataaaccacaattggctgatattgaaaatgaaagaaacttaaaaggtgggatggatcatgattactgtcgataactgcagataaatttgattagagtaataattttgtcatttaaaaacacagttgtttatactgcccatcctaggatgctcaccttccaagattcaacgtggctaaaacatcttctggtaaattgtgcgtccatattcattttgtcagtagccaggagaaatggggatgggggaaatacgacttagtgaggcatagacatccctggtccatcctttctgtctccagctgtttcttggaacctgctctcctgcttgctggtccctgacgcagagaccgttgcctcccccacagccgtttgactgaaggctgctctggagacctagagtaaaacggctgatggaagttgtgggacccacttccatttccttcagtcattagaggtggaagggaggggtctccaagtttggagattgagcagatgaggcttgggatgcccctgctttgacttcagccatggatgaggagtgggatggcagcaaggtggctcctgtggcagtggagttgtgccagaaacagtggccagttgtatcgcctataagacagggtaaggtctgaagagctgagcctgtaattctgctgtaataatgatagtgctcaagaagtgccttgagttggtgtacagtgccatggccatcaagaatcccagatttcaggttttattacaaaatgtaagtggtcacttggcgattttgtagtacatgcatgagttaccttttttctctatgtctgagaactgtcagattaaaacaagatggcaaagagatcgttagagtgcacaacaaaatcactatcccattagacacatcatcaaaagcttatttttattcttgcactggaagaatcgtaagtcaactgtttcttgaccatggcagtgttctggctccaaatggtagtgattccaaataatggttctgttaacactttggcagaaaatgccagctcagatattttgagatactaaggattatctttggacatgtactgcagcttcttgtctctgttttggattactggaatacccatgggccctctcaagagtgctggacttctaggacattaagatgattgtcagtacattaaacttttcaatcccattatgcaatcttgtttgtaaatgtaaacttctaaaaatatggttaataacattcaacctgtttattacaacttaaaaggaacttcagtgaatttgtttttattttttaacaagatttgtgaactgaatatcatgaaccatgttttgatacccctttttcacgttgtgccaacggaatagggtgtttgatatttcttcatatgttaaggagatgcttcaaaatgtcaattgctttaaacttaaattacctctcaagagaccaaggtacatttacctcattgtgtatataatgtttaatatttgtcagagcattctccaggtttgcagttttatttctataaagtatgggtattatgttgctcagttactcaaatggtactgtattgtttatatttgtaccccaaataacatcgtctgtactttctgttttctgtattgtatttgtgcaggattctttaggctttatcagtgtaatctctgccttttaagatatgtacagaaaatgtccatataaatttccattgaagtcgaatgatactgagaagcctgtaaagaggagaaaaaaacataagctgtgtttccccataagtttttttaaattgtatattgtatttgtagtaatattccaaaagaatgtaaataggaaatagaagagtgatgcttatgttaagtcctaacactacagtagaagaatggaagcagtgcaaataaattacatttttcccaagtgccagtggcatattttaaaataaagtgtatacgttggaatgagtcatgccatatgtagttgctgtagatggcaactagaacctttgagttacaagagtctttagaagttttctaaccctgcctagtgcaagttacaatattatagcgtgttcggggagtgccctcctgtctgcaggtgtgtctctgtgcctgggggcttttctccacatgcttaggggtgtgggtcttccattggggcatgatggacctgtctacaggtgatctctgttgcctttgggtcagcacatttgttagtctcctgggggtgaaaacttggcttacaagagaactggaaaaatgatgagatgtggtccccaaacccttgattgactctggggaggggctttgtgaataggattgctctcacattaaagatagttacttcaatttgaaggctggatttagggatttttttttttccttataacaaagacatcaccaggatatgaagcttttgttgaaagttggaaaaaaagtgaaattaaagacattcccagacaaa

SEQ ID NO: 336 - DNA, 4629 bp, Homo sapiens
ggagagggagaaggctctcgggcggagagaggtcctgcccagctgttggcgaggagtttcctgtttcccccgcagcgctgagttgaagttgagtgagtcactcgcgcgcacggagcgacgacacccccgcgcgtgcacccgctcgggacaggagccggactcctgtgcagcttccctcggccgccgggggcctccccgcgcctcgccggcctccaggccccctcctggctggcgagcgggcgccacatctggcccgcacatctgcgctgccggcccggcgcggggtccggagagggcgcggcgcggaggcgcagccaggggtccgggaaggcgccgtccgctgcgctgggggctcggtctatgacgagcagcggggtctgccatgggtcgggggctgctcaggggcctgtggccgctgcacatcgtcctgtggacgcgtatcgccagcacgatcccaccgcacgttcagaagtcggttaataacgacatgatagtcactgacaacaacggtgcagtcaagtttccacaactgtgtaaattttgtgatgtgagattttccacctgtgacaaccagaaatcctgcatgagcaactgcagcatcacctccatctgtgagaagccacaggaagtctgtgtggctgtatggagaaagaatgacgagaacataacactagagacagtttgccatgaccccaagctcccctaccatgactttattctggaagatgctgcttctccaaagtgcattatgaaggaaaaaaaaaagcctggtgagactttcttcatgtgttcctgtagctctgatgagtgcaatgacaacatcatcttctcagaagaatataacaccagcaatcctgacttgttgctagtcatatttcaagtgacaggcatcagcctcctgccaccactgggagttgccatatctgtcatcatcatcttctactgctaccgcgttaaccggcagcagaagctgagttcaacctgggaaaccggcaagacgcggaagctcatggagttcagcgagcactgtgccatcatcctggaagatgaccgctctgacatcagctccacgtgtgccaacaacatcaaccacaacacagagctgctgcccattgagctggacaccctggtggggaaaggtcgctttgctgaggtctataaggccaagctgaagcagaacacttcagagcagtttgagacagtggcagtcaagatctttccctatgaggagtatgcctcttggaagacagagaaggacatcttctcagacatcaatctgaagcatgagaacatactccagttcctgacggctgaggagcggaagacggagttggggaaacaatactggctgatcaccgccttccacgccaagggcaacctacaggagtacctgacgcggcatgtcatcagctgggaggacctgcgcaagctgggcagctccctcgcccgggggattgctcacctccacagtgatcacactccatgtgggaggcccaagatgcccatcgtgcacagggacctcaagagctccaatatcctcgtgaagaacgacctaacctgctgcctgtgtgactttgggctttccctgcgtctggaccctactctgtctgtggatgacctggctaacagtgggcaggtgggaactgcaagatacatggctccagaagtcctagaatccaggatgaatttggagaatgttgagtccttcaagcagaccgatgtctactccatggctctggtgctctgggaaatgacatctcgctgtaatgcagtgggagaagtaaaagattatgagcctccatttggttccaaggtgcgggagcacccctgtgtcgaaagcatgaaggacaacgtgttgagagatcgagggcgaccagaaattcccagcttctggctcaaccaccagggcatccagatggtgtgtgagacgttgactgagtgctgggaccacgacccagaggcccgtctcacagcccagtgtgtggcagaacgcttcagtgagctggagcatctggacaggctctcggggaggagctgctcggaggagaagattcctgaagacggctccctaaacactaccaaatagctcttctggggcaggctgggccatgtccaaagaggctgcccctctcaccaaagaacagaggcagcaggaagctgcccctgaactgatgcttcctggaaaaccaagggggtcactcccctccctgtaagctgtggggataagcagaaacaacagcagcagggagtgggtgacatagagcattctatgcctttgacattgtcataggataagctgtgttagcacttcctcaggaaatgagattgatttttacaatagccaataacatttgcactttattaatgcctgtatataaatatgaatagctatgttttatatatatatatatatatctatatatgtctatagctctatatatatagccataccttgaaaagagacaaggaaaaacatcaaatattcccaggaaattggttttattggagaactccagaaccaagcagagaaggaagggacccatgacagcattagcatttgacaatcacacatgcagtggttctctgactgtaaaacagtgaactttgcatgaggaaagaggctccatgtctcacagccagctatgaccacattgcacttgcttttgcaaaataatcattccctgcctagcacttctcttctggccatggaactaagtacagtggcactgtttgaggaccagtgttcccggggttcctgtgtgcccttatttctcctggacttttcatttaagctccaagccccaaatctggggggctagtttagaaactctccctcaacctagtttagaaactctaccccatctttaataccttgaatgttttgaaccccactttttaccttcatgggttgcagaaaaatcagaacagatgtccccatccatgcgattgccccaccatctactaatgaaaaattgttctttttttcatctttcccctgcacttatgttactattctctgctcccagccttcatccttttctaaaaaggagcaaattctcactctaggctttatcgtgtttactttttcattacacttgacttgattttctagttttctatacaaacaccaatgggttccatctttctgggctcctgattgctcaagcacagtttggcctgatgaagaggatttcaactacacaatactatcattgtcaggactatgacctcaggcactctaaacatatgttttgtttggtcagcacagcgtttcaaaaagtgaagccactttataaatatttggagattttgcaggaaaatctggatccccaggtaaggatagcagatggttttcagttatctccagtccacgttcacaaaatgtgaaggtgtggagacacttacaaagctgcctcacttctcactgtaaacattagctctttccactgcctacctggaccccagtctaggaattaaatctgcacctaaccaaggtcccttgtaagaaatgtccattcaagcagtcattctctgggtatataatatgattttgactaccttatctggtgttaagatttgaagttggccttttattggactaaaggggaactcctttaagggtctcagttagcccaagtttcttttgcttatatgttaatagttttaccctctgcattggagagaggagtgctttactccaagaagctttcctcatggttaccgttctctccatcatgccagccttctcaacctttgcagaaattactagagaggatttgaatgtgggacacaaaggtcccatttgcagttagaaaatttgtgtccacaaggacaagaacaaagtatgagctttaaaactccataggaaacttgttaatcaacaaagaagtgttaatgctgcaagtaatctcttttttaaaactttttgaagctacttattttcagccaaataggaatattagagagggactggtagtgagaatatcagctctgtttggatggtggaaggtctcattttattgagatttttaagatacatgcaaaggtttggaaatagaacctctaggcaccctcctcagtgtgggtgggctgagagttaaagacagtgtggctgcagtagcatagaggcgcctagaaattccacttgcaccgtagggcatgctgataccatcccaatagctgttgcccattgacctctagtggtgagtttctagaatactggtccattcatgagatattcaagattcaagagtattctcacttctgggttatcagcataaactggaatgtagtgtcagaggatactgtggcttgttttgtttatgtttttttttcttattcaagaaaaaagaccaaggaataacattctgtagttcctaaaaatactgacttttttcactactatacataaagggaaagttttattcttttatggaacacttcagctgtactcatgtattaaaataggaatgtgaatgctatatactctttttatatcaaaagtctcaagcacttatttttattctatgcattgtttgtcttttacataaataaaatgtttattagattgaataaagcaaaatactcaggtgagcatcctgcctcctgttcccattcctagtagctaaa

SEQ ID NO: 337 - DNA, 3283 bp, Homo sapiens
aggagaagagcaaagaaaagcagtccgtctggatttgtttgcccaggactggcgccgcgcacgcggatcgccgaggggagtgcggtcggagtcaccgcgcccccgcctccccgcccgggcagctgaggccgggggttggagcgctgcccccgcgcacagtccccgagcgcccgacgtctccgcgcaggttcttgaagcagctgggcctggggcgcccactaatgtggccctgagggccggagcccgcaccgacgggagcgggagccggagcagctgcgggcgccgagtggccggtgcgcccggcggagcgcgcgtgcgtggccagcgcgctccccgcttctgcttggctttccggcttaattttcctcggcgggattaaagttggaaattgaccggagaattgagttgccggggaacagagccccggccgccgccagagcgatgttcccgcagagccggcacccgacgccgcaccaggctgcaggccagcccttcaagttcactatcccggagtccctggaccggattaaagaggaattccagttcctgcaggcgcagtatcacagccttaaattggaatgtgagaaactggcaagtgaaaagacagaaatgcagaggcactatgtgatgtattatgaaatgtcatatggattaaacattgaaatgcacaaacagactgaaatcgccaagagattgaatacgatttgtgcacaagtcatcccatttctgtctcaggaacatcaacaacaggtggcccaggctgttgaacgtgccaaacaggtgaccatggcagagttgaatgccatcatcgggcagcagcagttgcaagctcagcatctttctcatggccacggacccccagttccccttacgcctcacccttcgggacttcagcctcctggaatcccgcccctcgggggcagtgccggccttcttgcgctgtctagtgctctgagtgggcagtctcacttggcaataaaagatgacaagaagcaccacgatgcagagcaccacagagacagagagccgggcacaagtaattccctcctggtcccagacagtctaagaggcacagataaacgcagaaatggacctgaattttccaatgacatcaagaaaaggaaggtggatgataaggactccagccactatgacagtgatggtgacaaaagcgatgacaacttagttgtggatgtgtctaatgaggacccttcttctccgcgagcaagccctgcccactcgccccgggaaaatggaatcgacaaaaatcgcctgctaaagaaggatgcttctagcagtccagcttccacggcctcctcggcaagttccacttctttgaaatccaaagaaatgagcttgcatgaaaaagccagcacgcctgttctgaaatccagcacaccaacgcctcggagcgacatgccaacgccgggcaccagcgccactccaggcctccgtccaggtctcggcaagcctccagccatagaccccctcgttaaccaagcggcagctggcttgaggacacccctggcagtgcccggcccatatcctgctccttttgggatggtcccccacgctggcatgaacggcgagctgaccagcccaggcgctgcctacgccagtttacacaacatgtcgccccagatgagcgccgcagccgccgcggccgccgtggtggcctacgggcgctcccccatggtggggtttgatcctccccctcacatgagagtacctaccattcctccaaacctggcaggaatccctggggggaaacctgcatactccttccacgttactgcagacggtcagatgcagcctgtcccttttccccccgacgccctcatcggacccggaatcccccggcatgctcgccagatcaacaccctcaaccacggggaggtggtgtgcgctgtgaccatcagcaaccccacgagacacgtgtacacaggcgggaagggctgcgtcaaggtctgggacatcagccaccctggcaataagagccctgtctcccagctcgactgtctgaacagagacaattatatccgttcctgtaaattgctacccgatggctgcactctcatagtgggaggggaagccagtactttgtccatttgggacctggcggctccaaccccgcgcatcaaggcggagctgacgtcctcggcccccgcctgctacgccctggccatcagccccgattccaaggtctgcttctcatgctgcagcgacggcaacatcgctgtgtgggatctgcacaaccagacactagtgaggcaattccagggccacacagacggagccagctgtattgacatttctaatgatggcaccaagctctggacgggtggtttggacaacacagtcaggtcctgggacctgcgcgaggggcggcagctgcagcagcacgacttcacctcccagatcttctccctggggtactgccccaccggggagtggctggcagtgggcatggagagcagcaatgtggaggtgctgcacgtgaacaagcctgacaagtaccagctgcacctgcatgagagctgcgtgctgtccctgaaatttgcttactgtggtaaatggtttgtgagtactggaaaagataacctcctcaatgcttggcggaccccctatggagccagcatattccagtccaaagagtcctcgtcagtgcttagctgtgacatctctgtggatgataagtacatagtcactggctcgggggacaagaaggctacagtctatgaagtcatctactgaaaacattatgtggtttaacgtttatagttgaattgggccaaaatgtttcgaatttatagaaatagaaaagttgtaactttaaaagagaaaaaaaattacaaacacctgtttccaaaccttgacagaaaactactttgagtctacaaagaggaggcgacaagtccatcagcagaaagtcacctgtctacatagaccaaatggagcaccaaggccaagcggacagaggggccatgggttgtaggattgaggaacggaatctgccgactcacatgacagcccattctttctttctgggtgatctggggatcacgccttgcccaagtgtgagattacctttctgttccttgcagttcacctcactttccgtcctttgtagagcagtggtgtctccaatgaacttgtttcctggttttgcatcttgtgaaatgtttttttgtatttttgttgaaggttaaacatttgtataaattgtaaatatatttggtttattacagtaaaggctttagtaccaataaaaaaaaaaaaaaaa

SEQ ID NO: 338 - DNA, 2579 bp, Homo sapiens
ctctctcctccctctttcttcgggcagcctccccaccaccccacttcagcctcccccactcttgccgcctccatatcatcaagctctggtggcgcctggggggcttttcggatcggcaggatgtacccccagggaaggcacccgaccccgctccagtccggccagcccttcaagttctcgatcttggagatctgcgaccgcatcaaagaagaattccagtttcttcaggctcaataccacagcctcaagctagaatgtgagaagctggccagcgagaagacggaaatgcagcgacattatgtcatgtattatgagatgtcgtacgggctcaacattgaaatgcataagcaggcggagattgtgaagcgtctgagcggtatctgcgctcagattatccccttcctgacccaggagcatcagcagcaggtgctccaggccgtagaacgcgccaagcaggtcaccgtgggggagctgaacagcctcatcgggcagcagctccagccgctgtcccaccacgcaccccctgtgcccctcaccccccgcccagccgggctggtgggcggcagtgctacggggctgcttgctctgtctggagccctggctgcccaggctcagctggcggcggctgtcaaggaggaccgtgcgggcgtggaggccgaggggtccagagtggagagagccccgagcaggagtgcatctccctcgccccctgagagtctcgtggaggaggagcgaccgagtggccctggtggtggcgggaagcagagagcagatgagaaggagccatcaggaccttatgaaagcgacgaagacaagagtgattacaatctggtggtggacgaggaccaaccctcagagccccccagcccggctaccaccccctgcggaaaggtacccatctgcattcctgcccgtcgggacctggtggacagtccagcctccttggcctctagccttggctcaccgctgcctagagccaaggagctcatcctgaatgaccttcccgccagcactcctgcctccaaatcctgtgactcctccccgccccaggacgcttccacccccgggcccagctcggccagtcacctctgccagcttgctgccaagccagcaccttccacggacagcgtcgccctgaggagccccctgactctgtccagtcccttcaccacgtccttcagcctgggctcccacagcactctcaacggagacctctccgtgcccagctcctacgtcagcctccacctgtccccccaggtcagcagctctgtggtgtacggacgctcccccgtgatggcatttgagtctcatccccatctccgagggtcatccgtctcttcctccctacccagcatccctgggggaaagccggcctactccttccacgtgtctgcggacgggcagatgcagccggttcccttcccctcggatgcactggtaggcgcgggcatcccgcggcacgcccggcagctgcacacgctggcccatggcgaggtggtctgcgcggtcaccatcagcggctccacacagcatgtgtacacgggcggcaagggctgtgtgaaggtgtgggacgtgggccagcctggggccaagacgcccgtggcccagctcgactgcctgaaccgagacaactacattcgttcctgcaagttgctgccggatggccggagtctgatcgtgggcggtgaggccagcaccttgtccatttgggacctggcggcgcccaccccccgtatcaaggccgagctgacttcctcagccccagcctgctacgccctggccgtcagccccgacgccaaggtttgcttctcctgctgcagcgatggcaacattgtggtctgggacctgcagaatcagactatggtcaggcagttccagggccacacggacggcgccagctgcattgatatttccgattacggcactcggctctggacagggggcctggacaacacggtgcgctgctgggacctgcgggagggccgccagctgcagcagcatgacttcagctcccagattttctccctgggccactgccctaaccaggactggctggcggtcggaatggagagtagcaacgtggagatcctgcacgtccgcaagccggagaaataccagctgcacctccacgagagctgcgtgctgtccctgaagtttgcctcctgcggacggtggtttgtgagcaccgggaaggacaacctgctcaacgcctggaggacgccgtacggggccagcattttccagtccaaggagtcgtcctcagtcctgagttgtgacatctccagaaataacaaatacatcgtgacaggctcgggggacaagaaggccaccgtgtatgaggtggtctactgagacatgaccccccttcctgtacccgaagtccagactcccaggggaatcagcagccaggacagacatcctagcagccgcctcccagccctgcctaggaaccgtacatcccatctgctctctggccaacggcttcacaccttcccctgctgcatgtgggggccgatgggcaggggacctcggtggaaataaaatgtatctatcacatccgcaaaaaaaaaaaaaaaaaa

SEQ ID NO: 339 - DNA, 2357 bp, Homo sapiens
gaatcacgacccctccctgccatgtatccgcagggcagacatccggctccccatcaacccgggcagccgggatttaaattcacggtggctgagtcttgtgacaggatcaaagacgaattccagttcctgcaagctcagtatcacagcctcaaagtggagtacgacaagctggcaaacgagaagacggagatgcagcgccattatgtgatgtactatgagatgtcctatggcttgaacattgaaatgcacaagcagacagagattgcgaagagactgaacacaattttagcacagatcatgcctttcctgtcacaagagcaccagcagcaggtggcgcaggcagtggagcgcgccaagcaggtcaccatgacggagctgaacgccatcatcgggcagcagcagctccaggcgcagcacctctcccatgccacacacggccccccggtccagttgccaccccacccgtcaggtctccagcctccaggaatccccccagtgacagggagcagctccgggctgctggcactgggcgccctgggcagccaggcccatctgacggtgaaggatgagaagaaccaccatgaactcgatcacagagagagagaatccagtgcgaataactctgtgtcaccctcggaaagcctccgggccagtgagaagcaccggggctctgcggactacagcatggaagccaagaagcggaaggtggaggagaaggacagcttgagccgatacgacagtgatggagacaagagtgatgatctggtggtggatgtttccaatgaggaccccgcaacgccccgggtcagcccggcacactcccctcctgaaaatgggctggacaaggcccgtagcctgaaaaaagatgcccccaccagccctgcctcggtggcctcttccagtagcacaccttcctccaagaccaaagaccttggtcataacgacaaatcctccacccctgggctcaagtccaacacaccaaccccaaggaacgacgccccaactccaggcaccagcacgaccccagggctcaggtcgatgccgggtaaacctccgggcatggacccgataggtataatggcctcggctctgcgcacgcccatctccatcaccagctcctatgcggcgcccttcgccatgatgagccaccatgagatgaacggctccctcaccagtcctggcgcctacgccggcctccacaacatcccaccccagatgagcgccgccgccgctgctgcagccgctgcctatggccgatcgccaatggtgagctttggagctgttggttttgaccctcaccccccgatgcgggccacaggcctcccctcaagcctggcctccattcctggaggaaaaccagcgtactcattccatgtgagtgctgatgggcagatgcagcccgtgcccttcccccacgacgccctggcaggccccggcatcccgaggcacgcccggcagatcaacacactcagccacgggggggtggtgtgtgccgtgaccatcagcaaccccagcaggcacgtctacacaggtggcaagggctgcgtgaagatctgggacatcagccagccaggcagcaagagccccatctcccagctggactgcctgaacagggacaattacatgcgctcctgcaagctgcaccctgatgggcgcacgctcatcgtgggcggcgagggcagcacgctcaccatctgggacctggcctcgcccacgccccgcatcaaggccgagctgacgtcctcggctcccgcctgttatgccctggccattagccctgacgccaaagtctgcttctcctgctgcagcgatgggaacattgctgtctgggacctgcacaaccagaccctggtcaggcagttccagggccacacagatggggccagctgcatagacatctcccatgatggcaccaaactgtggacagggggcctggacaacacggtgcgctcctgggacctgcgggagggccgacagctacagcagcatgacttcacttcccagatcttctcgctgggctactgccccactggggagtggctggctgtgggcatggagagcagcaacgtggaggtgctgcaccacaccaagcctcacaagtaccagctgcacctgcacgagagctgcgtgctctccctcaagttcgcctactgcggcaagtggttcgtgagcactgggaaagataaccttctcaacgcctggaggacgccttatggagccagcatatcccagtctaaagaatcctcgtctgtcttgagttgtgacatttcagcggatgacaaatacattgtaacaggctctggtgacaagaaggccacagtttatgaggtcatctactaaacaagaactccagcagg

SEQ ID NO: 340 - DNA, 4749 bp, Homo sapiens
acagagcgtgttgttagagctgtgctgagcgggtgtttgggttgttggctgctttcttccccctttctcacacacttgtatattattttgaggtggtgttcgcagagtttgaaaggagagagaattaaaaaaaaaagccgcaagcgtttcactcttttatttttataatccccttcaatttggggttaaaaaaaagacaagaaaacaggaaggaagagaaataaggaaatgagatgtggtaaaagaagctaaaaggtgccttttaaaagatcgttgctgtgaagtgaaaaaaatctccagagaaaccaaaaagcaccgccgagacctcttccgaaccaaaggagtttgtgtttgcttttagggaagaagaaagatcattcattcggaggaataacaaccaattaaaagacaaataaaaaaagtttggagtgggacgcagagcgagcgagaggagctgccggcgggcggtggggcgcggagcccgcactttcccggccgggtgagcggcggccgcggcgccgggctcggcgggtgcgcctcggcggagcgaacgtcggagcgttgccttgggagacgcgcgccggacaatgcccgcggcgggccagtgacgcccgcggggaatgcggagcggcccggcagccggcacccagccgccgccgcgcgttcctgccgcccgtgtcacgcgagacccggcgggggccgggaccgcccgagccgcccctcagaccgagccggccgcctccgctgccgcggccgcctcctcttcggggtcattaaagccaatgagccgcgcgcctctgccgagcgcagccaactaaatcggcttggatgattcgcgacctgagcaagatgtacccgcagaccagacacccggcaccgcatcagcctgctcaaccctttaaatttacaatttccgaatcctgtgatcggattaaggaagagtttcagtttttacaggctcaataccacagtctgaagctggaatgtgagaaactcgccagtgagaagacagagatgcagcggcattatgtcatgtattatgaaatgtcctatgggttgaatatagaaatgcacaagcaggcagagattgtcaagaggctgaatgctatctgtgcacaagtcattcctttcctgtcccaagagcaccagcaacaagtggtgcaggctgtggaacgggccaagcaggtgaccatggcagaactgaacgccatcattgggcaacaactccaggcccagcatttatcacatggacatggtctccccgtacctctgactccacacccttcagggctccagccccctgccattccacccatcggtagcagtgccgggcttctggccctctccagtgctctaggaggtcagtcccatcttccaattaaagatgagaagaagcaccatgacaatgatcaccaaagagacagagactccatcaagagctcttcagtatccccatcagccagtttccgaggtgctgagaagcacagaaactccgcagactactcctcagagagcaaaaagcagaaaactgaagaaaaggaaattgcagctcgttatgacagcgatggtgagaaaagtgatgacaacttggtggttgacgtttccaatgaggatccatcttcccctcgagggagcccagcacattcccccagagagaatggcctagacaagacacgcctgctcaagaaagatgccccgattagtccagcctctattgcatcttccagcagtactccctcctccaaatccaaagaacttagccttaatgaaaaatctactactcccgtctcaaagtccaatacccctactccacgaactgatgcgcccaccccaggcagtaactctactcccggattgaggcctgtacctggaaaaccaccaggagttgaccctttggcctcaagcctaaggaccccaatggcagtaccttgtccatatccaactccatttgggattgtgccccatgctggaatgaacggagagctgaccagccccggagcggcctacgctgggctccacaacatctcccctcagatgagcgcagctgctgccgccgccgctgctgctgctgcctatgggagatcaccagtggtgggatttgatccacaccatcacatgcgtgtgccagcaatacctccaaacctgacaggcattccaggaggaaaaccagcatactccttccatgttagcgcagatggtcagatgcagcctgtcccttttccacccgacgccctcatcggacctggaatcccccggcatgctcgccagatcaacaccctcaaccacggggaggtggtgtgcgcggtgaccatcagcaaccccacgagacacgtgtacacgggtgggaagggctgcgtcaaggtctgggacatcagccacccaggcaataagagtcctgtctcccagctcgactgtctgaacagggataactacatccgttcctgcagattgctccctgatggtcgcaccctaattgttggaggggaagccagtactttgtccatttgggacctggcggctccaaccccacgcatcaaggcagagctgacatcctcggcccccgcctgctatgccctggccatcagccccgattccaaggtctgcttctcatgctgcagcgacggcaacatcgctgtgtgggatctgcacaaccagaccttggtgaggcaattccagggccacacagatggagccagctgtattgacatttctaatgatggcaccaagctctggacaggtggtttggacaacacggtcaggtcctgggacctgcgcgaggggcggcagctgcagcagcacgacttcacctcccagatcttttctctgggctactgcccaactggagagtggcttgcagtggggatggagaacagcaatgtggaagttttgcatgtcaccaagccagacaaataccaactacatcttcatgagagctgtgtgctgtcgctcaagtttgcccattgtggcaaatggtttgtaagcactggaaaggacaaccttctgaatgcctggagaacaccttatggggccagtatattccagtccaaagaatcctcatcggtgcttagctgtgacatctccgtggacgacaaatacattgtcactggctctggggataagaaggccacagtttatgaagttatttattaaagacaaatcttcatgcagactggacttctcctcctggtagcactttgctctgtcatcctttttgttcacccccatccccgcatctaaaaccaaggatttcagatactcattgcagttgtggagtttaatcccctttcttaacctcacttcccacttgctattgaattgtgaatagtcattaaaaacctgtgataccaaatcttcagctgtctacttggaagaacatggaataagcatacttaacagtgaaaagaatctttaattatgtattatatctgtaatatatttattttgtttaaagaaggctttctaacaatgactgactaaataaagctgtctgctcctgcattgataatgaaggtgcgttgtatttgatacccctccccccctttttttggcaaaggaggggaaaggaaggtttaaaataattgatttaaaatgtcactaagtgtagactgatgactgtatagagatgtgaaatgtataattacacatggaagcaatatgttgctgtgttgttattaggttttttttgtttttgttttctacatcttttaaagacttttggaaatttggctgaacaattagaacacaacaggccaactcatactcatttggatctatttagacaacgttaaccaatatatctatagctttagattatattcgataaaagtaattggactttttttctttttttgactcgttgacaagtgtctttgtaatatgtttttagttccctttttttgttgtattataggcagatgaacaaattaaatttggcctcaaagagagaacttactcccttctggatatttttgccacatttctttgcaaaaggagatatatatatctttagtcagttttgttgttatgagaaattatgggttattttgtggcatgctctttgggagctgcacagttatggggaggactcccactgctgtgcaagttaagtcttttacaaaacaaggacagcagaggagggtttgcagagacctccctctgaaaaacacaaagaatggactctctcctgggatgaggacttgctttctttacctccggttctttccatgtcttagttggatgtccctgaaatggacacaggctgtgccattgtgccagaaacattgtgttatcttttatgttgttgttgttgctgttaaactataatatgtgacttctttttttattattttttgtttgaatgctttaaaaatcttttaagtctgtggatctgctgatgtacagtgcctttgctgctatggatcaaaatcaaaagaaccgtgtagatatactttattgtataagtagaaaattacttaatttcatactagaaatggatggatgctgcaagttgaaatggactgtccattgacgttcctaatgtggtagcagaaaaaaaaaaatggtgtcttaagtgcttagtgtttgatgtcattaacagtttcgtaaaactctacagtgtagaaagattttgatactaaactgtgcgttgtacatagttctaatgcattgtattgaccaccagtacttctataatggtagattgtttgtgaattcagacttttaagcattaaacataaataacttctagaa

SEQ ID NO: 341 - DNA, 8187 bp, Homo sapiens
cccgagaagcggcggggcggcgggccggcgggcggggcgcagagccaggcagcgcaggtatagccaggctggagaaaagaagctgccaccatggttgcactttcactgaagatcagcattgggaatgtggtgaagacgatgcagtttgagccgtctaccatggtgtacgacgcctgccgcatcattcgtgagcggatcccagaggccccagctggtcctcccagcgactttgggctctttctgtcagatgatgaccccaaaaagggtatatggctggaggctgggaaagctttggactactacatgctccgaaatggggacactatggagtacaggaagaaacagagacccctgaagatccgtatgctggatggaactgtgaagacgatcatggtggatgactctaagactgtcactgacatgctcatgaccatctgtgcccgcattggcatcaccaatcatgatgaatattcattggttcgagagctgatggaagagaaaaaggaggaaataacagggaccttaagaaaggacaagacattgctgcgagatgaaaagaagatggagaaactaaagcagaaattgcacacagatgatgagttgaactggctggaccatggtcggacactgagggagcagggtgtagaggagcacgagacgctgctgctgcggaggaagttcttttactcagaccagaatgtggattcccgggaccctgtacagctgaacctcctgtatgtgcaggcacgagatgacatcctgaatggctcccaccctgtctcctttgacaaggcctgtgagtttgctggcttccaatgccagatccagtttgggccccacaatgagcagaagcacaaggctggcttccttgacctgaaggacttcctgcccaaggagtatgtgaagcagaagggagagcgtaagatcttccaggcacacaagaattgtgggcagatgagtgagattgaggccaaggtccgctacgtgaagctagcccgttctctcaagacttacggtgtctccttcttcctggtgaaggaaaaaatgaaagggaagaacaagctagtgcccaggcttctgggcatcaccaaggagtgtgtgatgcgagtggatgagaagaccaaggaagtgatccaggagtggaacctcaccaacatcaaacgctgggctgcgtctcccaaaagcttcaccctggattttggagattaccaagatggctattactcagtacagacaactgaaggggagcagattgcacagctcattgccggctacatcgatatcatcctgaagaagaaaaaaagcaaggatcactttgggctggaaggagatgaggagtctactatgctggaggactcagtgtcccccaaaaagtcaacagtcctgcagcagcaatacaaccgggtggggaaagtggagcatggctctgtggccctgcctgccatcatgcgctctggagcctctggtcctgagaatttccaggtgggcagcatgccccctgcccagcagcagattaccagcggccagatgcaccgaggacacatgcctcctctgacttcagcccagcaggcactcactggaaccattaactccagcatgcaggccgtgcaggctgcccaggccaccctggatgactttgacactctgccgcctcttggccaggatgctgcctctaaggcctggcgtaaaaacaagatggatgaatcaaagcatgagatccactctcaggtagatgccatcacagctggtactgcgtctgtggtgaacctgacagcaggggaccctgctgagacagactataccgcagtgggctgtgcagtcaccacaatctcctccaacctgacggagatgtcccgtggggtgaagctgctggctgccttgctggaggacgaaggcggcagtggtcggcccctgttgcaggcagcaaagggccttgcgggagcagtgtcagaactgctgcgcagtgcccaaccagccagtgctgagccccgtcagaacctgctgcaagcagctgggaacgtgggccaggccagtggggagctgttgcaacaaattggggaaagtgatactgacccccacttccaggatgcgctaatgcagctcgccaaagctgtggcaagtgctgcagctgccctggtcctcaaggccaagagtgtggcccagcggacagaggactcgggacttcagacccaagttattgctgcagcaacacagtgtgccctatccacttcccaactagtggcctgtactaaggtggtggcacctacaatcagctcacctgtctgccaagagcaactggtggaggctggacgactggtagccaaagccgtggagggctgtgtgtctgcctcccaggcagctacagaggatgggcaactgttgcgaggggtaggagcagcagccacagctgtcacccaggccctaaatgagctgctgcagcatgtgaaagcccatgccacaggggctgggcctgctggccgttatgaccaggctactgacaccatcctaaccgtcactgagaacatctttagctccatgggtgatgctggggagatggtgggacaggcccgcatcctggcccaagccacatctgacctggtcaatgccatcaaggctgatgctgagggggaaagtgatctggagaactcccgcaagctcttaagtgctgccaagatcctagctgatgccacagccaagatggtagaggctgccaagggagcagctgcccaccctgacagtgaggagcagcagcagcggctgcgggaggcagctgaggggctgcgcatggccaccaatgcagctgcgcagaatgccatcaagaaaaagctggtgcagcgcctggagcatgcagccaagcaggctgcagcctcagccacacagaccatcgctgcagctcagcacgcagcctctacccccaaagcctctgccggcccccagcccctgctggtgcagagctgcaaggcagtggcagagcagattccactgctggtgcagggcgtccgaggaagccaagcccagcctgacagccccagcgctcagcttgccctcattgctgccagccagagcttcctgcagccaggtgggaagatggtggcagctgcaaaggcctcagtgccaacgattcaggaccaggcttcagccatgcagctgagtcagtgtgccaagaacctgggcaccgcgctggctgaactccggacggctgcccagaaggctcaggaagcatgtggacctttggagatggattctgcactgagtgtggtacagaatctagagaaagatctacaggaagtgaaggcagcagctcgagatggcaagcttaaacccttacctggggagacaatggagaagtgtacccaggacctgggcaacagcaccaaagccgtgagctcagccatcgcccagctactgggagaggttgcccagggcaatgagaattatgcaggtattgcagctcgggatgtggcaggtgggctgcggtcactggcccaggccgctaggggagtcgctgcactgacgtcagatcctgcagtgcaggccattgtacttgatacggccagtgatgtgctggacaaggccagcagcctcattgaggaggcgaaaaaggcagctggccatccaggggaccctgagagccagcagcggcttgcccaggtggctaaagcagtgacccaggctctgaaccgctgtgtcagctgcctacctggccagcgcgatgtggataatgccctgagggcagttggagatgccagcaagcgactcctgagtgactcgcttcctcctagcactgggacatttcaagaagctcagagccggttgaatgaagctgctgctgggctgaatcaggcagccacagaactggtgcaggcctctcggggaacccctcaggacctggctcgagcctcaggccgatttggacaggacttcagcaccttcctggaagctggtgtggagatggcaggccaggctccgagccaggaggaccgagcccaagttgtgtccaacttgaagggcatctccatgtcttcaagcaaacttcttctggctgccaaggccctgtccacggaccctgctgcccctaacctcaagagtcagctggctgcagctgccagggcagtaactgacagcatcaatcagctcatcactatgtgcacccagcaggcacccggccagaaggagtgtgataacgccctgcgggaattggagacggtccgggaactcctggagaacccagtccagcccatcaatgacatgtcctactttggttgcctggacagtgtaatggagaactcaaaggtgctgggcgaggccatgactggcatctcccaaaatgccaagaacggaaacctgccagagtttggagatgccatttccacagcctcaaaggcactttgtggcttcaccgaggcagctgcacaggctgcatatctggttggtgtctctgaccccaatagccaagctggacagcaagggctagtggagcccacacagtttgcccgtgcaaaccaggcaattcagatggcctgccagagtttgggagagcctggctgtacccaggcccaggtgctctctgcagccaccattgtggctaaacacacctctgcactgtgtaacagctgtcgcctggcttctgcccgtaccaccaatcctactgccaagcgccagtttgtacagtcagccaaggaggtggccaacagcacagctaatcttgtcaagaccatcaaggcgctagatggggccttcacagaggagaaccgtgcccagtgccgagcagcaacagcccctctgctggaggctgtggacaatctgagtgcctttgcgtccaaccctgagttctccagcattcctgcccagatcagccctgagggtcgggctgccatggagcccattgtgatctctgccaagacaatgttagagagtgccgggggactcatccagacagcccgggccctcgcagtcaatccccgggaccccccgagctggtcggtgctggccggccactcccgtactgtctcagactccatcaagaagctaattacaagcatgagggacaaggctccagggcagctggagtgtgaaacggccattgcagctctgaacagttgtctacgggacctagaccaggcttccctcgctgcagtcagccagcagcttgctccccgtgagggaatctctcaagaggccttgcacactcagatgctcactgcagtccaagagatctcccatctcattgagccgctggccaatgctgcccgggctgaagcctcccagctgggacacaaggtgtcccagatggcgcagtactttgagccgctcaccctggctgcagtgggtgctgcctccaagaccctgagccacccgcagcagatggcactcctggaccagactaaaacattggcagagtctgccctgcagttgctatacactgccaaggaggctggtggtaacccaaagcaagcagctcacacccaggaagccctggaggaggctgtgcagatgatgaccgaggccgtagaggacctgacaacaaccctcaacgaggcagccagtgctgctggggtcgtgggtggcatggtggactccatcacccaggccatcaaccagctagatgaaggaccaatgggtgaaccagaaggttccttcgtggattaccaaacaactatggtgcggacagccaaggccattgcagtgaccgttcaggagatggttaccaagtcaaacaccagcccagaggagctgggccctcttgctaaccagctgaccagtgactatggccgtctggcctcggaggccaagcctgcagcggtggctgctgaaaatgaagagataggttcccatatcaaacaccgggtacaggagctgggccatggctgtgccgctctggtcaccaaggcaggcgccctgcagtgcagccccagtgatgcctacaccaagaaggagctcatagagtgtgcccggagagtctctgagaaggtctcccacgtcctggctgcgctccaggctgggaatcgtggcacccaggcctgcatcacagcagccagcgctgtgtctggtatcattgctgacctcgacaccaccatcatgttcgccactgctggcacgctcaatcgtgagggtactgaaactttcgctgaccaccgggagggcatcctgaagactgcgaaggtgctggtggaggacaccaaggtcctggtgcaaaacgcagctgggagccaggagaagttggcgcaggctgcccagtcctccgtggcgaccatcacccgcctcgctgatgtggtcaagctgggtgcagccagcctgggagctgaggaccctgagacccaggtggtactaatcaacgcagtgaaagatgtagccaaagccctgggagacctcatcagtgcaacgaaggctgcagctggcaaagttggagatgaccctgctgtgtggcagctaaagaactctgccaaggtgatggtgaccaatgtgacatcattgcttaagacagtaaaagccgtggaagatgaggccaccaaaggcactcgggccctggaggcaaccacagaacacatacggcaggagctggcggttttctgttccccagagccacctgccaagacctctaccccagaagacttcatccgaatgaccaagggtatcaccatggcaaccgccaaggccgttgctgctggcaattcctgtcgccaggaagatgtcattgccacagccaatctgagccgccgtgctattgcagatatgcttcgggcttgcaaggaagcagcttaccacccagaagtggcccctgatgtgcggcttcgagccctgcactatggccgggagtgtgccaatggctacctggaactgctggaccatgtactgctgaccctgcagaagccaagcccagaactgaagcagcagttgacaggacattcaaagcgtgtggctggttccgtcactgagctcatccaggctgctgaagccatgaagggaacagaatgggtagacccagaggaccccacagtcattgctgagaatgagctcctgggagctgcagccgccattgaggctgcagccaaaaagctagagcagctgaagccccgggccaaacccaaggaggcagatgagtccttgaactttgaggagcagatactagaagctgccaagtccattgcagcagccaccagtgcactggtaaaggctgcgtcggctgcccagagagaactagtggcccaagggaaggtgggtgccattccagccaatgcactggacgatgggcagtggtcccagggcctcatttctgctgcccggatggtggctgcggccaccaacaatctgtgtgaggcagccaatgcagctgtacaaggccatgccagccaggagaagctcatctcatcagccaagcaggtagctgcctccacagcccagctccttgtggcctgcaaggtcaaggctgaccaggactcggaggcaatgaaacgacttcaggctgctggcaacgcagtgaagcgagcctcagataatctggtgaaagcagcacagaaggctgcagcctttgaagagcaggagaatgagacagtggtggtgaaagagaagatggttggcggcattgcccagatcatcgcagcacaggaagaaatgcttcggaaggaacgagagctggaagaggcgcggaagaaactggcccagatccggcagcagcagtacaagtttctgccttcagagcttcgagatgagcactaaagaagcctcttctatttaatgcagacccggcccagagactgtgcgtgccactaccaaagccttctgggctgtcggggcccaacctgcccaaccccagcactccccaaagtgcctgccaaaccccagggcctggccccgcccagtcccgcagtacatcccctgtcccctccccaaccccaagtgccttcatgccctagggccccccaagtgcctgcccctccccagagtattaacgctccaagagtattattaacgctgctgtacctcgatctgaatctgccggggccccagcccactccaccctgccagcagcttccagccagtccccacagcctcatcagctctcttcaccgttttttgatactatcttcccccacccccagctacccataggggctgcagagttataagccccaaacaggtcatgctccaataaaaatgattctacctacaaaaaaaaaaaaaaaaaaa

SEQ ID NO: 342 - DNA, 8500 bp, Homo sapiens
atggtggccctgtccttaaagatttgtgtgcgccactgcaacgtggtgaagaccatgcagtttgaaccatctacagctgtgtacgatgcgtgtcgagtcattcgggaacgggtgcctgaggcacaaactgggcaagcttctgactatggactctttctttcggatgaagacccgaggaaagggatttggctggaagcgggcagaacactggattactacatgttgcggaatggggatattttggaatataaaaagaaacagagacctcagaaaatccggatgctggatggatctgtgaagacagtgatggtggatgattccaagactgtgggggagctcctggtcactatttgtagcagaataggaataacaaattatgaagaatactccttaatccaagaaactattgaagaaaagaaagaggaaggaacgggcacactcaaaaaagacaggacactgttacgagatgagaggaaaatggagaagttgaaggccaagctgcacacagatgatgacctaaattggctggatcacagccgaacattcagagaacaaggagtagatgaaaacgaaacgttgctgcttagacggaagttcttttactctgatcagaatgtagattcgagagaccccgtgcagctgaacttgctttatgttcaggcacgggatgacatcctgaatggctctcaccctgtctccttcgagaaagcttgtgagtttggtggatttcaagcccagatacaatttggacctcatgtggaacataaacacaaacctggatttttagacctgaaggaattcctgcccaaagaatatatcaagcagagaggagctgaaaagaggatctttcaggcacataagaactgcggagagatgagtgagatagaagccaaggtcaagtacgtcaaactcgcacggtccctccgcacatatggcgtgtccttcttcctggtgaaggagaagatgaaaggcaagaacaagctggtgcctcgcctgctggggatcaccaaagactcggtgatgcgcgtggatgagaagaccaaggaagtgctgcaggagtggcccctcaccaccgtcaagcgctgggcagcctcacccaagagcttcacactggattttggggagtatcaggaaagctactattcagtacaaaccaccgagggagagcagatatcccagctgattgcaggctacattgacatcatcctgaaaaagaaacaaagtaaagatcgatttggactagaaggtgatgaggagtcaaccatgttagaagagtccgtttccccaaaaaagtccaccatcttgcagcagcagttcaaccggaccgggaaggcagagcacggctcagtggcgctgccggccgtgatgcgctcgggctccagcgggcctgagaccttcaacgttggcagcatgccctcgccacagcagcaggtcatggttgggcagatgcaccgaggccacatgccgccactgacttcagcccagcaggccctgatggggaccatcaacacaagcatgcacgccgtccagcaggcccaggatgatctcagtgagctcgactcgctgccacctctcggccaggatatggcatctagggtatgggttcagaacaaagtcgacgaatccaaacacgaaatccattctcaagttgatgctatcacggccggaacggcttcagttgttaacctcacagctggtgaccctgcagacactgactacacagctgtgggatgtgcgatcaccactatttcttccaacctgacggagatgtccaagggtgtgaagctattggccgccctcatggatgatgaggtgggcagcggggaggacttgctcagagctgccaggaccctcgctggggcggtgtcagacttgctgaaagctgtgcagcctacttctggagagcctcgacagacagttttgactgctgctggcagcatcggacaagccagtggggatcttctgagacagattggagagaatgagactgatgagcgattccaggatgttttaatgagtttggccaaagctgttgccaatgcagctgccatgttggtactaaaggcaaagaatgttgcccaagtggccgaagacactgtcctacagaacagggtaattgctgctgccacccagtgtgccctctccacctcccagcttgtggcatgtgccaaggttgtgagccccactattagctcccctgtgtgccaggagcagctgattgaagcagggaagctggtggaccgctcggtggagaactgtgtccgtgcctgccaggcggccactaccgatagtgagctcctgaagcaggtcagcgcagcggccagcgtggtcagccaggccctccatgatctcctgcagcatgtgcggcagtttgccagccgaggcgagcccatcggccgctacgaccaggctactgacaccatcatgtgtgtcaccgagagcatcttcagctccatgggtgacgctggtgaaatggtgcgccaggcgcgggttctggcccaagccacatcagacctcgtcaatgccatgaggtcagatgcagaagccgaaatcgacatggagaattcaaagaagctcctggcagcagcaaaactcttagctgactccactgctcgcatggtggaagctgcaaagggggctgcagccaacccagagaatgaggaccagcagcaaaggctgagagaagctgcagaaggcctccgggtagcaaccaacgcagctgcccagaatgctattaagaaaaaaattgtcaaccgactggaggttgcagccaagcaggccgcagcggcagctacacagaccatcgccgcctcccagaatgcagctgtttccaacaagaaccctgcggcccagcagcagctggtccagagttgcaaggcagtggctgatcacatccctcagctggtccagggagtgagggggagccaagctcaagctgaagacctgagtgcccagctggctctcatcatctccagccagaacttcctccagcctggaagcaagatggtgtcctctgccaaagccgcagtgcccaccgtgagtgaccaggccgcagccatgcagctgagccagtgtgccaagaacctggccaccagcttggcggagctgcgtaccgcctcgcagaaggcccatgaagcttgtggtccgatggaaatcgattcagctctgaatacggtgcagacgcttaagaatgaactgcaggatgccaagatggcagccgtggagagccagctgaagccacttccaggggaaacgctggaaaaatgtgctcaggacctgggaagcacatccaaggcggtgggctcctccatggcacagctgctgacctgtgctgctcaaggcaacgaacactacacaggggtggctgctagagagacggcccaagctctgaaaacactggcccaggccgcccgtggagtggctgcatcgacaaccgaccccgcggccgcccatgccatgttagattctgctcgagacgtgatggagggctccgccatgctcattcaagaggccaagcaggccctgattgcacctggagatgcagagcgtcaacaaagactggctcaggtggctaaagccgtctcacactccttgaataactgcgtaaattgcctccctgggcagaaggatgtggacgtggccttgaagagcatcggggagtccagcaagaagctgcttgtggattcgctacctccaagcacgaagcctttccaggaagcccagagtgaactgaaccaggcagcagctgatctgaaccagtctgctggggaagtggtccatgccacccggggccagagtggagagttggctgcagcctctggaaagttcagtgatgattttgatgaattcctcgatgctggcattgagatggctggccaagctcagacaaaagaagaccagatccaagtgatagggaacctcaagaatatctcgatggcatccagcaagctgctgttagctgccaagtctctctctgtagatccaggagctcccaatgcgaaaaatctcctggctgcagctgcaagagctgtgacagagagcatcaatcaactcatcactctgtgtacccaacaagctccgggccagaaagagtgcgataatgccctgcgggagctcgagactgtgaaggggatgttggacaatcctaatgaacctgttagtgacctctcttactttgactgcattgagagtgtgatggaaaactccaaggttctgggtgaatcgatggcagggatttcacagaatgccaagaccggagacctccctgcctttggggaatgtgtggggattgcatccaaggctctctgtgggctgacagaggctgcagcccaggctgcatacttggttggcatctctgatccaaacagccaggcaggccaccagggcctggtggaccccatccagtttgccagggctaaccaggccatccagatggcatgccagaacttggtggaccctggcagcagcccatcacaggtcctgtcagccgccacaattgttgccaagcacacgtcagccttgtgtaatgcctgccgcatcgcctcatccaagacggccaacccagtagccaagaggcacttcgtccagtcagccaaggaagtcgccaacagcactgccaacctggtgaagaccatcaaggccctggatggggatttctctgaagacaaccgcaataagtgtcgcatcgccaccgcacccttgattgaagctgtggagaacctgacagcgttcgcctcaaaccctgagtttgtcagcattcctgcccagatcagctccgagggttcccaggcacaggaaccaatcctggtctcagccaagaccatgctggagagttcatcgtacctcattcgcactgcacgctctctggccatcaaccccaaagacccacccacctggtctgtactggctggacattcccatacagtgtccgactccatcaagagtctcatcacttctatcagggacaaggcccctggacagagggagtgtgattactccatcgatggcatcaaccggtgcatccgggacatcgagcaggcctcgctggccgccgtcagccagagcctggccacgagggacgacatctctgtggaggccctgcaggagcagctgacttcggtggtccaggaaatcggacaccttatcgatcccatcgccacagcggctcggggagaagcagctcagctgggacataaggtgacacaactggcaagctattttgagcccttgatcttagccgcagttggtgtggcctccaagattcttgatcatcagcagcagatgacggtgctggaccagaccaagactctcgcagagtctgccttgcagatgttgtatgcagccaaagaaggtggcggaaaccccaaggcacaacacacccatgacgccatcacagaggccgcccagttgatgaaggaagccgtggatgacatcatggtgacgctgaacgaagctgccagtgaagtggggctggttgggggcatggtggacgccattgcagaagccatgagcaagctggatgaaggcactcctccagaaccaaagggaacatttgtcgactatcagacgactgtggttaaatactccaaagccattgcggtgacagctcaggaaatgatgactaagtcggttactaacccggaggagttgggaggactggcttcacaaatgaccagtgactatgggcacctggctttccagggccagatggcagcagccacggcggaaccagaggagatcggattccagattcgcactcgtgtgcaggacctgggccacggctgtatcttcctggtgcagaaggcaggggccctccaggtctgccccacagacagctacaccaagagggagctgatcgaatgcgcccgtgccgtcacggaaaaggtctccttggtgctctcggctctccaggccgggaacaaaggaacccaggcatgcattacagccgccaccgctgtgtctgggatcattgccgacctggacaccaccattatgtttgcaacagcggggacgctgaatgcagagaacagtgagaccttcgcagaccacagggagaacattctcaagacggccaaggccttggtagaagacacgaaactacttgtgtcaggagctgcgtccactcctgacaagctggcccaggcggcccagtcctcagcagccaccatcacccagctcgcagaagtggtcaagctgggggcagccagcctgggctccgacgaccccgagacccaggtggttttgatcaatgccatcaaagatgtggccaaggccctttctgatctcatcagtgctaccaagggagctgccagcaagccagtggacgacccttccatgtaccagctcaagggggctgccaaggtgatggtgaccaatgtcacctcgctcctcaagactgtaaaggcagtggaggatgaggccacccggggcaccagggcgcttgaggccacaattgaatgcataaagcaggagcttacggtgttccagtcaaaagacgtacctgaaaagacatcatcacctgaagaatccataaggatgacgaaaggcatcaccatggcaacagccaaagccgtggcagctgggaactcatgtagacaggaggacgtgattgctactgccaacctgagccggaaagccgtgtcagatatgttgacggcttgcaagcaagcatccttccaccccgatgtcagtgacgaggtgagaaccagagccttgcgtttcgggacggagtgcacccttggctacttggacctcctggagcacgtcttggtgattcttcagaaaccaaccccagaattcaagcagcagctggccgctttctccaagcgagtcgccggcgctgtgacagagctcatccaggcggcggaagccatgaaaggaacagagtgggtggatccagaagacccaactgtcattgcagaaacagagttactgggggctgcagcatccatcgaagctgctgctaagaagttagagcaactgaagccaagagcaaaaccaaaacaagcggatgagaccctggactttgaggaacagatcttggaagctgctaaatccattgctgctgccacaagcgccctggtcaaatcggcctcagcagcccagagggagctggtggcccaaggaaaggtgggctccatccctgccaatgctgcagacgacggacagtggtcacaggggctgatttctgctgcccggatggtggcggctgcgaccagcagtctctgtgaggcggccaatgcctccgttcagggacacgccagcgaggagaagctcatctcatctgccaagcaggtcgccgcttccacggctcagctgctggtggcctgcaaggtgaaggccgaccaggattcagaggccatgaggcggctacaggcggcaggaaatgctgtgaaaagagcctcagacaatcttgtccgtgcagcccagaaggcagcttttggcaaagctgatgacgacgatgttgtagtgaaaaccaagtttgtggggggcattgctcagatcatcgccgcccaggaagaaatgctaaagaaagagcgagaactggaagaagcaaggaaaaaactggcccaaatccgccagcagcagtataagtttttacccaccgagctgagggaagatgagggctaaaggtgcgagcccagatggcgagccccaggggatggccctggctgaactggacagacagtgttcctgagaggctgggcacttagctggaaaccgcccacctccctcccgggtgagcctggagccctgcgtgcttgttctcacatctctgtcccgtcggcactggctgcatgatcgtgatgtcacacggtacaatgtcctacccacaactcctctgccgcctcccctcatgcctcaccgtgtctcaggagagaggggtgcacgtttcatggactgttaccaacaaagaaaagtcagtattatgttgttctcagacactttggcttttgttggtccttctcttaggcctgctcctggacctctttatgatattgtgatagggaaaaaaatcattgacgtcatagaatattcttcttcctctcaggagaagacggaagctggagttggacatggttcataaaagccagaaacacaaacccgtgtggactccgggagggtgactcaggtcctccttccatgtcttgagcactggctcacccagggggtgaaaaattcccgcccctgtttgcacgctttcttgcctccgtgtgtaagctccttgtacaacccagacccatcttgtattttgtggcccagaaaactgaacgattattttgttcctccgtagtccaaagggcagagttgcggaaggccgtcggggcttggtgagcaggggctgtaatacagtctgtgggctccttaccctgcagaggctgtttcagctcacacagagtcatccacacaaacccacggctcccagttgacagtcagtggaatgctcgtctccttagcgtccagggtggggattctgctggaataaagagcttcctcagtg

SEQ ID NO: 343 - DNA, 2640 bp, Homo sapiens
acttgtcatggcgactgtccagctttgtgccaggagcctcgcaggggttgatgggattggggttttcccctcccatgtgctcaagactggcgctaaaagttttgagcttctcaaaagtctagagccaccgtccagggagcaggtagctgctgggctccggggacactttgcgttcgggctgggagcgtgctttccacgacggtgacacgcttccctggattggcagccagactgccttccgggtcactgccatggaggagccgcagtcagatcctagcgtcgagccccctctgagtcaggaaacattttcagacctatggaaactacttcctgaaaacaacgttctgtcccccttgccgtcccaagcaatggatgatttgatgctgtccccggacgatattgaacaatggttcactgaagacccaggtccagatgaagctcccagaatgccagaggctgctccccccgtggcccctgcaccagcagctcctacaccggcggcccctgcaccagccccctcctggcccctgtcatcttctgtcccttcccagaaaacctaccagggcagctacggtttccgtctgggcttcttgcattctgggacagccaagtctgtgacttgcacgtactcccctgccctcaacaagatgttttgccaactggccaagacctgccctgtgcagctgtgggttgattccacacccccgcccggcacccgcgtccgcgccatggccatctacaagcagtcacagcacatgacggaggttgtgaggcgctgcccccaccatgagcgctgctcagatagcgatggtctggcccctcctcagcatcttatccgagtggaaggaaatttgcgtgtggagtatttggatgacagaaacacttttcgacatagtgtggtggtgccctatgagccgcctgaggttggctctgactgtaccaccatccactacaactacatgtgtaacagttcctgcatgggcggcatgaaccggaggcccatcctcaccatcatcacactggaagactccagtggtaatctactgggacggaacagctttgaggtgcgtgtttgtgcctgtcctgggagagaccggcgcacagaggaagagaatctccgcaagaaaggggagcctcaccacgagctgcccccagggagcactaagcgagcactgcccaacaacaccagctcctctccccagccaaagaagaaaccactggatggagaatatttcacccttcagatccgtgggcgtgagcgcttcgagatgttccgagagctgaatgaggccttggaactcaaggatgcccaggctgggaaggagccaggggggagcagggctcactccagccacctgaagtccaaaaagggtcagtctacctcccgccataaaaaactcatgttcaagacagaagggcctgactcagactgacattctccacttcttgttccccactgacagcctcccacccccatctctccctcccctgccattttgggttttgggtctttgaacccttgcttgcaataggtgtgcgtcagaagcacccaggacttccatttgctttgtcccggggctccactgaacaagttggcctgcactggtgttttgttgtggggaggaggatggggagtaggacataccagcttagattttaaggtttttactgtgagggatgtttgggagatgtaagaaatgttcttgcagttaagggttagtttacaatcagccacattctaggtaggggcccacttcaccgtactaaccagggaagctgtccctcactgttgaattttctctaacttcaaggcccatatctgtgaaatgctggcatttgcacctacctcacagagtgcattgtgagggttaatgaaataatgtacatctggccttgaaaccaccttttattacatggggtctagaacttgacccccttgagggtgcttgttccctctccctgttggtcggtgggttggtagtttctacagttgggcagctggttaggtagagggagttgtcaagtctctgctggcccagccaaaccctgtctgacaacctcttggtgaaccttagtacctaaaaggaaatctcaccccatcccacaccctggaggatttcatctcttgtatatgatgatctggatccaccaagacttgttttatgctcagggtcaatttcttttttcttttttttttttttttttctttttctttgagactgggtctcgctttgttgcccaggctggagtggagtggcgtgatcttggcttactgcagcctttgcctccccggctcgagcagtcctgcctcagcctccggagtagctgggaccacaggttcatgccaccatggccagccaacttttgcatgttttgtagagatggggtctcacagtgttgcccaggctggtctcaaactcctgggctcaggcgatccacctgtctcagcctcccagagtgctgggattacaattgtgagccaccacgtccagctggaagggtcaacatcttttacattctgcaagcacatctgcattttcaccccacccttcccctccttctccctttttatatcccatttttatatcgatctcttattttacaataaaactttgctgccacctgtgtgtctgaggggtg

SEQ ID NO: 344 - DNA, 5474 bp, Homo sapiens
ccggcggcgtcccggggccaggggggtgcgcctttctccgcgtcggggcggcccggagcgcggtggcgcggcgcgggaggggttttctggtgcgtcctggtccaccatggccaaaccaacaagcaaagattcaggcttgaaggagaagtttaagattctgttgggactgggaacaccgaggccaaatcccaggtctgcagagggtaaacagacggagtttatcatcaccgcggaaatactgagagaactgagcatggaatgtggcctcaacaatcgcatccggatgatagggcagatttgtgaagtcgcaaaaaccaagaaatttgaagagcacgcagtggaagcactctggaaggcggtcgcggatctgttgcagccggagcggccgctggaggcccggcacgcggtgctggctctgctgaaggccatcgtgcaggggcagggcgagcgtttgggggtcctcagagccctcttctttaaggtcatcaaggattacccttccaacgaagaccttcacgaaaggctggaggttttcaaggccctcacagacaatgggagacacatcacctacttggaggaagagctggctgactttgtcctgcagtggatggatgttggcttgtcctcggaattccttctggtgctggtgaacttggtcaaattcaatagctgttacctcgacgagtacatcgcaaggatggttcagatgatctgtctgctgtgcgtccggaccgcgtcctctgtggacatagaggtctccctgcaggtgctggacgccgtggtctgctacaactgcctgccggctgagagcctcccgctgttcatcgttaccctctgtcgcaccatcaacgtcaaggagctctgcgagccttgctggaagctgatgcggaacctccttggcacccacctgggccacagcgccatctacaacatgtgccacctcatggaggacagagcctacatggaggacgcgcccctgctgagaggagccgtgttttttgtgggcatggctctctggggagcccaccggctctattctctcaggaactcgccgacatctgtgttgccatcattttaccaggccatggcatgtccgaacgaggtggtgtcctatgagatcgtcctgtccatcaccaggctcatcaagaagtataggaaggagctccaggtggtggcgtgggacattctgctgaacatcatcgaacggctccttcagcagctccagaccttggacagcccggagctcaggaccatcgtccatgacctgttgaccacggtggaggagctgtgtgaccagaacgagttccacgggtctcaggagagatactttgaactggtggagagatgtgcggaccagaggcctgagtcctccctcctgaacctgatctcctatagagcgcagtccatccacccggccaaggacggctggattcagaacctgcaggcgctgatggagagattcttcaggagcgagtcccgaggcgccgtgcgcatcaaggtgctggacgtgctgtcctttgtgctgctcatcaacaggcagttctatgaggaggagctgattaactcagtggtcatctcgcagctctcccacatccccgaggataaagaccaccaggtccgaaagctggccacccagttgctggtggacctggcagagggctgccacacacaccacttcaacagcctgctggacatcatcgagaaggtgatggcccgctccctctccccacccccggagctggaagaaagggatgtggccgcatactcggcctccttggaggatgtgaagacagccgtcctggggcttctggtcatccttcagaccaagctgtacaccctgcctgcaagccacgccacgcgtgtgtatgagatgctggtcagccacattcagctccactacaagcacagctacaccctgccaatcgcgagcagcatccggctgcaggcctttgacttcctgttgctgctgcgggccgactcactgcaccgcctgggcctgcccaacaaggatggagtcgtgcggttcagcccctactgcgtctgcgactacatggagccagagagaggctctgagaagaagaccagcggccccctttctcctcccacagggcctcctggcccggcgcctgcaggccccgccgtgcggctggggtccgtgccctactccctgctcttccgcgtcctgctgcagtgcttgaagcaggagtctgactggaaggtgctgaagctggttctgggcaggctgcctgagtccctgcgctataaagtgctcatctttacttccccttgcagtgtggaccagctgtgctctgctctctgctccatgctttcaggcccaaagacactggagcggctccgaggcgccccagaaggcttctccagaactgacttgcacctggccgtggttccagtgctgacagcattaatctcttaccataactacctggacaaaaccaaacagcgcgagatggtctactgcctggagcagggcctcatccaccgctgtgccagccagtgcgtcgtggccttgtccatctgcagcgtggagatgcctgacatcatcatcaaggcgctgcctgttctggtggtgaagctcacgcacatctcagccacagccagcatggccgtcccactgctggagttcctgtccactctggccaggctgccgcacctctacaggaactttgccgcggagcagtatgccagtgtgttcgccatctccctgccgtacaccaacccctccaagtttaatcagtacatcgtgtgtctggcccatcacgtcatagccatgtggttcatcaggtgccgcctgcccttccggaaggattttgtccctttcatcactaagggcctgcggtccaatgtcctcttgtcttttgatgacacccccgagaaggacagcttcagggcccggagtactagtctcaacgagagacccaagaggatacagacgtccctcaccagtgccagcttggggtctgcagatgagaactccgtggcccaggctgacgatagcctgaaaaacctccacctggagctcacggaaacctgtctggacatgatggctcgatacgtcttctccaacttcacggctgtcccgaagaggtctcctgtgggcgagttcctcctagcgggtggcaggaccaaaacctggctggttgggaacaagcttgtcactgtgacgacaagcgtgggaaccgggacccggtcgttactaggcctggactcgggggagctgcagtccggcccggagtcgagctccagccccggggtgcatgtgagacagaccaaggaggcgccggccaagctggagtcccaggctgggcagcaggtgtcccgtggggcccgggatcgggtccgttccatgtcggggggccatggtcttcgagttggcgccctggacgtgccggcctcccagttcctgggcagtgccacttctccaggaccacggactgcaccagccgcgaaacctgagaaggcctcagctggcacccgggttcctgtgcaggagaagacgaacctggcggcctatgtgcccctgctgacccagggctgggcggagatcctggtccggaggcccacagggaacaccagctggctgatgagcctggagaacccgctcagccctttctcctcggacatcaacaacatgcccctgcaggagctgtctaacgccctcatggcggctgagcgcttcaaggagcaccgggacacagccctgtacaagtcactgtcggtgccggcagccagcacggccaaaccccctcctctgcctcgctccaacacagactccgccgtggtcatggaggagggaagtccgggcgaggttcctgtgctggtggagcccccagggttggaggacgttgaggcagcgctaggcatggacaggcgcacggatgcctacagcaggtcgtcctcagtctccagccaggaggagaagtcgctccacgcggaggagctggttggcaggggcatccccatcgagcgagtcgtctcctcggagggtggccggccctctgtggacctctccttccagccctcgcagcccctgagcaagtccagctcctctcccgagctgcagactctgcaggacatcctcggggaccctggggacaaggccgacgtgggccggctgagccctgaggttaaggcccggtcacagtcagggaccctggacggggaaagtgctgcctggtcggcctcgggcgaagacagtcggggccagcccgagggtcccttgccttccagctccccccgctcgcccagtggcctccggccccgaggttacaccatctccgactcggccccatcacgcaggggcaagagagtagagagggacgccttaaagagcagagccacagcctccaatgcagagaaagtgccaggcatcaaccccagtttcgtgttcctgcagctctaccattcccccttctttggcgacgagtcaaacaagccaatcctgctgcccaatgagtcacagtcctttgagcggtcggtgcagctcctcgaccagatcccatcatacgacacccacaagatcgccgtcctgtatgttggagaaggccagagcaacagcgagctcgccatcctgtccaatgagcatggctcctacaggtacacggagttcctgacgggcctgggccggctcatcgagctgaaggactgccagccggacaaggtgtacctgggaggcctggacgtgtgtggtgaggacggccagttcacctactgctggcacgatgacatcatgcaagccgtcttccacatcgccaccctgatgcccaccaaggacgtggacaagcaccgctgcgacaagaagcgccacctgggcaacgactttgtgtccattgtctacaatgactccggtgaggacttcaagcttggcaccatcaagggccagttcaactttgtccacgtgatcgtcaccccgctggactacgagtgcaacctggtgtccctgcagtgcaggaaagacatggagggccttgtggacaccagcgtggccaagatcgtgtctgaccgcaacctgcccttcgtggcccgccagatggccctgcacgcaaatatggcctcacaggtgcatcatagccgctccaaccccaccgatatctacccctccaagtggattgcccggctccgccacatcaagcggctccgccagcggatctgcgaggaagccgcctactccaaccccagcctacctctggtgcaccctccgtcccatagcaaagcccctgcacagactccagccgagcccacacctggctatgaggtgggccagcggaagcgcctcatctcctcggtggaggacttcaccgagtttgtgtgaggccggggccctccctcctgcactggccttggacggtattgcctgtcagtgaaataaataaagtcctgaccccagtgcacagacatagaggcacagattgcaaaaaaaaaaaaaaaaaaaaaaaaaaaaaaaaaaaaaaaaaaaa

SEQ ID NO: 345 - DNA, 971 bp, Homo sapiens
cactcgttgcataaatttgcgctccgccagcccggagcatttaggggcggttggctttgttgggtgagcttgtttgtgtccctgtgggtggacgtggttggtgattggcaggatcctggtatccgctaacaggtcaaaatgcagatcttcgtgaaaacccttaccggcaagaccatcacccttgaggtggagcccagtgacaccatcgaaaatgtgaaggccaagatccaggataaggaaggcattccccccgaccagcagaggctcatctttgcaggcaagcagctggaagatggccgtactctttctgactacaacatccagaaggagtcgaccctgcacctggtcctgcgtctgagaggtggtatgcagatcttcgtgaagaccctgaccggcaagaccatcaccctggaagtggagcccagtgacaccatcgaaaatgtgaaggccaagatccaggataaagaaggcatccctcccgaccagcagaggctcatctttgcaggcaagcagctggaagatggccgcactctttctgactacaacatccagaaggagtcgaccctgcacctggtcctgcgtctgagaggtggtatgcagatcttcgtgaagaccctgaccggcaagaccatcactctggaggtggagcccagtgacaccatcgaaaatgtgaaggccaagatccaagataaagaaggcatcccccccgaccagcagaggctcatctttgcaggcaagcagctggaagatggccgcactctttctgactacaacatccagaaagagtcgaccctgcacctggtcctgcgcctgaggggtggctgttaattcttcagtcatggcattcgcagtgcccagtgatggcattactctgcactatagccatttgccccaacttaagtttagaaattacaagtttcagtaatagctgaacctgttcaaaatgttaataaaggtttcgttgcatggta

SEQ ID NO: 346 - DNA, 2602 bp, Homo sapiens
gagccgcggctaaggaacgcgggccgcccacccgctcccggtgcagcggcctccgcgccgggttttggcgcctcccgcgggcgcccccctcctcacggcgagcgctgccacgtcagacgaagggcgcagcgagcgtcctgatccttccgcccggacgctcaggacagcggcccgctgctcataagactcggccttagaaccccagtatcagcagaaggacattttaggacgggacttgggtgactctagggcactggttttctttccagagagcggaacaggcgaggaaaagtagtcccttctcggcgattctgcggagggatctccgtggggcggtgaacgccgatgattatataaggacgcgccgggtgtggcacagctagttccgtcgcagccgggatttgggtcgcagttcttgtttgtggatcgctgtgatcgtcacttgacaatgcagatcttcgtgaagactctgactggtaagaccatcaccctcgaggttgagcccagtgacaccatcgagaatgtcaaggcaaagatccaagataaggaaggcatccctcctgaccagcagaggctgatctttgctggaaaacagctggaagatgggcgcaccctgtctgactacaacatccagaaagagtccaccctgcacctggtgctccgtctcagaggtgggatgcaaatcttcgtgaagacactcactggcaagaccatcacccttgaggtcgagcccagtgacaccatcgagaacgtcaaagcaaagatccaggacaaggaaggcattcctcctgaccagcagaggttgatctttgccggaaagcagctggaagatgggcgcaccctgtctgactacaacatccagaaagagtctaccctgcacctggtgctccgtctcagaggtgggatgcagatcttcgtgaagaccctgactggtaagaccatcaccctcgaggtggagcccagtgacaccatcgagaatgtcaaggcaaagatccaagataaggaaggcattccttctgatcagcagaggttgatctttgccggaaaacagctggaagatggtcgtaccctgtctgactacaacatccagaaagagtccaccttgcacctggtactccgtctcagaggtgggatgcaaatcttcgtgaagacactcactggcaagaccatcacccttgaggtcgagcccagtgacactatcgagaacgtcaaagcaaagatccaagacaaggaaggcattcctcctgaccagcagaggttgatctttgccggaaagcagctggaagatgggcgcaccctgtctgactacaacatccagaaagagtctaccctgcacctggtgctccgtctcagaggtgggatgcagatcttcgtgaagaccctgactggtaagaccatcactctcgaagtggagccgagtgacaccattgagaatgtcaaggcaaagatccaagacaaggaaggcatccctcctgaccagcagaggttgatctttgccggaaaacagctggaagatggtcgtaccctgtctgactacaacatccagaaagagtccaccttgcacctggtgctccgtctcagaggtgggatgcagatcttcgtgaagaccctgactggtaagaccatcactctcgaggtggagccgagtgacaccattgagaatgtcaaggcaaagatccaagacaaggaaggcatccctcctgaccagcagaggttgatctttgctgggaaacagctggaagatggacgcaccctgtctgactacaacatccagaaagagtccaccctgcacctggtgctccgtcttagaggtgggatgcagatcttcgtgaagaccctgactggtaagaccatcactctcgaagtggagccgagtgacaccattgagaatgtcaaggcaaagatccaagacaaggaaggcatccctcctgaccagcagaggttgatctttgctgggaaacagctggaagatggacgcaccctgtctgactacaacatccagaaagagtccaccctgcacctggtgctccgtcttagaggtgggatgcagatcttcgtgaagaccctgactggtaagaccatcactctcgaagtggagccgagtgacaccattgagaatgtcaaggcaaagatccaagacaaggaaggcatccctcctgaccagcagaggttgatctttgctgggaaacagctggaagatggacgcaccctgtctgactacaacatccagaaagagtccaccctgcacctggtgctccgtctcagaggtgggatgcaaatcttcgtgaagaccctgactggtaagaccatcaccctcgaggtggagcccagtgacaccatcgagaatgtcaaggcaaagatccaagataaggaaggcatccctcctgatcagcagaggttgatctttgctgggaaacagctggaagatggacgcaccctgtctgactacaacatccagaaagagtccactctgcacttggtcctgcgcttgagggggggtgtctaagtttccccttttaaggtttcaacaaatttcattgcactttcctttcaataaagttgttgcattcccaaaaaaaaaaaaaaaaaaaaaaaaaaaaaa

SEQ ID NO: 347 - DNA, 971 bp, Homo sapiens
gattgcttgaggagagaagtatgtgatcagaaagcattctttgtctattaactcctgcccagcaaaagtgaaagaaaattcatgggagcatgcaagaacaaagagcacagcaaagctggacaaacacagcaatccaggcaggggatttccaactcaactctggtatgtaagctgcatgcaaagtcctttttctgtctctggtttctggccccttgtctgcagagatggctcccaatgcttcctgcctctgtgtgcatgtccgttccgaggaatgggatttaatgacctttgatgccaacccatatgacagcgtgaaaaaaatcaaagaacatgtccggtctaagaccaaggttcctgtgcaggaccaggttcttttgctgggctccaagatcttaaagccacggagaagcctctcatcttacggcattgacaaagagaagaccatccaccttaccctgaaagtggtgaagcccagtgatgaggagctgcccttgtttcttgtggagtcaggtgatgaggcaaagaggcacctcctccaggtgcgaaggtccagctcagtggcacaagtgaaagcaatgatcgagactaagacgggtataatccctgagacccagattgtgacttgcaatggaaagagactggaagatgggaagatgatggcagattacggcatcagaaagggcaacttactcttcctggcatcttattgtattggagggtgaccaccctgggcatggggtgttggcaggggtcaaaaagcttatttcttttaatctcttactcaacgaacacatcttctgatgatttcccaaaattaatgagaatgagatgagtagagtaagatttgggtgggatgggtaggatgaagtatattgcccaactctatgtttctttgattctaacacaattaattaagtgacatgatttttactaatgtattactgagactagtaaataaatttttaagccaa

SEQ ID NO: 348 - DNA, 8691 bp, Homo sapiens
aggaagcggaaagcagcagtgcagcggcggcggcggcggggctctgcctctccaggagcccagcgcaggccgcagagccggggccgctgtgagccgagaccgcgggccgcggagctcgggcggccggcgcggagaatttgttcctgttgaagagtggctcctcttctaatttccagactccttgaggttttaggagtctggtaggtgaaattttctacctctaaggagaaacagtacctgctccttcctcaagcgcaagccctccattgctatggataccgaatccacttattctggatattcttactattcaagtcattcgaaaaaatctcacagacaaggggaaagaactagagagagacacaagtcaccccggaataaagacggcagagggtcagaaaagtctgtcaccattcaacctcccactggagagcccctgttgggaaatgattctactcggacagaggaagttcaggatgacaactggggagagaccaccacggccatcacaggcacctcggagcacagcatatcccaagaggacattgccaggatcagcaaggacatggaggacagcgtggggctggattgcaaacgctacctgggcctcaccgtcgcctcttttcttggacttctagttttcctcacccctattgccttcatccttttacctccgatcctgtggagggatgagctggagccttgtggcacaatttgtgaggggctctttatctccatggcattcaaactcctcattctgctcatagggacctgggcactttttttccgcaagcggagagctgacatgccacgggtgtttgtgtttcgtgcccttttgttggtcctcatctttctctttgtggtttcctattggcttttttacggggtccgcattttggactctcgggaccggaattaccagggcattgtgcaatatgcagtctcccttgtggatgccctcctcttcatccattacctggccatcgtcctgctggagctcaggcagctgcagcccatgttcacgctgcaggtggtccgctccaccgatggcgagtcccgcttctacagcctgggacacctgagtatccagcgagcagcattggtggtcctagaaaattactacaaagatttcaccatctataacccaaacctcctaacagcctccaaattccgagcagccaagcatatggccgggctgaaagtctacaatgtagatggccccagtaacaatgccactggccagtcccgggccatgattgctgcagctgctcggcgcagggactcaagccacaacgagttgtattatgaagaggccgaacatgaacggcgagtaaagaagcggaaagcaaggctggtggttgcagtggaagaggccttcatccacattcagcgtctccaggctgaggagcagcagaaagccccaggggaggtgatggaccctagggaggccgcccaggccattttcccctccatggccagggctctccagaagtacctgcgcatcacccggcagcagaactaccacagcatggagagcatcctgcagcacctggccttctgcatcaccaacggcatgacccccaaggccttcctagaacggtacctcagtgcgggccccaccctgcaatatgacaaggaccgctggctctctacacagtggaggcttgtcagtgatgaggctgtgactaatggattacgggatggaattgtgttcgtccttaagtgcttggacttcagcctcgtagtcaatgtgaagaaaattccattcatcatactctctgaagagttcatagaccccaaatctcacaaatttgtccttcgcttacagtctgagacatccgtttaaaagttctatatttgtggctttattaaaaaaaaaagaaaaatatatagagagatatatatctatgccagaggggtgtcttttttaaaaattcttcttcattgctgactgaaactggcagatgattgaccagtatcctttgaccatctgcactttatttggaaggaagcaggggctgtccaccctgaaaaagagtgactgatgacatctgacttttgtcgatgggacttctcaagaagccattccttggagcttctgttacagctgtaaaccaaagtggagctggtgcttcttgggagcctcgccttacaactaattcctgcctttcgtccagtaccaagtcccccgttgcttctggtcagcccacttgtagacttccaggggacacatctttattctgtttcaggaaaccagtcacgacacgtccacatatgtatttgtgtatgttaatgtccagtatcacatcacccatgaaagtcgtgggcagttcaggagatacctgccttcatctttgttctttgttgccttaggttcttcagagaaagatcacaacaaaaaatgtacactgtcgtttacagctattaagtgatttgattttgtttttttcccaaagagaaaacctacctgccctgtttctgatcccacccctctgctggcttgaagcaggtaaccctttcccagccctgcagctgcccacctggcctccatgccatcctgcccccacctggctggcagccctggctctccatgtgtgccctccggctctgtgtgaagcctcaagtcagtcccagcattgtttccatagggaagtgtggggtgcccagcaggtaaagcacagggagagagggcagtgggaatgccacctttaggctgcagcaggagccccacactgcccagttttcctccccactgttctacaccaaccaggggagactaacactgtgactctgggattggcaggtgcaacttggagccacttaatttcctggggacgtaagttcttcccaagcttagagcaagctgccctgccaaaggagaccaaaccatgccaaccacgctggcaactgctgctgtccagtccctgtgttttctgaccaccgtcactgtgcaactcatcgcctctgccacttaggaccaggaaagaggctggttttgctcccactcttagttgctgataaagtggggagaaggaaaatggacactctacagagtttggggaagggagagtagggagcccatcttgtccagaaagattcatctgtggtctgtctgttaaacacagctgatttcagtgggctttcccctggccctgggggagcagacactgactgggttgtgggcagaggagccatcctggcggagccctgctgcaggggagctccttcaggagccccatccggacctcttgcactgggctgcctttgcctccatttgccttcctgtatctgcaacaaaccttttaaaagtgttcactcttgctttttccagtatttcggtaatcagccatcttgctgtagtacaggatgacattgtcgaatgctctttgtatgtgtgcacacccccttactcccttactgcttcatacactccacaagtggtacagtattttgtgtcattgtaaaaatcaaaattggctttggatctttgtaatacacctgtacctgaaaaagtaaacaacattcttcaattactagccttcagcttgaaaagacatgctggagaagaaggaagggggaacccataggtgtggcgtggagccaagatgtactattcaactatgtgtttctgtttataaaaaacacataccatggaaccatggtgcttttgttcttagtttttgccgttagatcccttcaaactggaagttccttacaatatctttctcaggaaatattttgggaaatggggtaagagatggcaagtgtgagacgggctgtgtcagaggttgctacgtcatggatacagtgcagttccaagtgccataagtgtatgtacatatagttaataatgacactgttcatcaccattctaaaatactgttcttccaaccctatcttcaatgaccagtccagaaggggttaagctggattcatttgctctggcatgtgcattcccagcagggtgaagaaaggtttaaattaaagaatttattttctctctcccccttcctctttctcccagtctttgcataggagaatgttagacattcagaaattactgtttctgttttaaattgagtattgatttttttatattgactttgtattgagttctttttgaaagaataacaaaataaaatgcaggatctttgtaaagcctttgcactttcaacctctttatagcttgagttacttttgcagtgggaacaatgtaaatgacatttaaaagatttaaggtttcagaaagctgcatcccacaattgaacacaatgcatttttatttcaattcttggaactggtaggctattctttttaaaagggggtaaacttcgccctaaggctggtagaatgtatgttcacattatagtagacaggatttcatttgccttatatgtttatagattttttataattttcatcctacgttattaaaattagagcattgagtgttaaagaacttaatgaggagtctatatctgagattgctctcttccctggtgatgttttaactggtagataatttgttcttaaatatgtacttttgaagataggacagtttttatagtccatgaactgaatgttaaaaagttctgtatgcattctcagagaggattttaaagctatatagttcatccatcctttgcattatcaaaatgttaagtcaaatctgtaatactttggctaaaattcataaagtaagccctagagaaaatacttgaccaccaaatttttgcccaactatcatcacctcccttcccccgcctctgttcttgccttttgacatctacatggaagacaagttctttacagcaaatggtaagaggcaggtgacctggtgtgtttgctgtgttgtagttcattgcctggggcttgggactccttttttaatggagagactagctgtgcaggtgtgtgttggatagggataaagtgctcacccctgccctctctacagtagttggtggtagatttctctctcattttgcctcataatcactttcgagtgcatgtatttacctaagggctgtagctctgtgggatgctaccagcatattggactgacagaaattgattaccttgccactccaacctacgtactgagtgagtgctccagccactcagtgaaaccaacaaaagtgagtccttggtttaccttccaatctgggtcctgctgtgtaagtatccctaagtggggatgcatatttgtttgtgcgtttttatttccatatatgtgagcatttctctgagtgtattaccagacggatagcacatttatatgtcagacatcttaacatctgtgttatctgtagcaggtgtgtagctcagcagatacgtgtcattgtgtatatagctgagtgtgtgagggtgtctgtgtttctgcagtcccctgtgtttgagagatgacttaataaccctgtgttttgagaggtcgctctaaaccagtgacttttccctcccctgctttattcctttccctcactgacactggcttctcccgctagagtaaatggctttagcacagcactgtcttctggggagcctgctgtcctgcaggcaagtccattaaactctttcttgctttaggactctgaaaacagcaagaaacaaacaaacaaaggtcaagctctaagaaaattactgctcaaacttcactaccctggaagccttactagatatttcttaaggtaacttaaaaattgggctttatttttaaaaagtgataggttacttacagtagcacagaaatgttagcatatttatttaaatagtcctgcagcagagaccctgcgattgtaaagtgatttaagtatttctgggtagtgtttgtgatttacggatttgttactgaaaaacaaaaaaatcactactgtgaatttactactatgtaaccttgtggtcgtatttcattataaataaaataagaattgctcttctgcccaccgttcttgattggtattcagtgcagtagcgaaatgagatagtttagacactgttgaaataactgcattgagctttaaccaagtgtatgctcagaaaattcagttttggatcacattttgacaaaacatgttttggtcaaagaaaggaaaggctactaacacatttatcaggtaatgtatgtcacagtccgtgttccacccagccttgttatccccacattctttcaagataggagtcatcttggtttttcgggtgaaaaacggaaggtcagagaggaaggggcttgtccaaggtctcatgtctggttaacagaatttcaaactagatgtttgattctaacccctcagtccactgtaccttgaagtatggtctaaatgattcggcacttctggatgttgaggaaggacctagagacacatccttgaactagaacctggggtgagagttcattgggaggcaggatctcttctttcactttggatttacaccttgtcccttggaaagcttctccactatgctagcaaatatcttaggatatttgatggaaagaacttgagaatcccttctggaaaacccagcctttcagtgttaacacctgctgcaagacagggatgctgttgttctggcagcccccctttgcttttgcctggccccaccttctgctcccactctgctggcttgggcaagatgcgtgccttgggccttgggtgcagggaggcaggcaggggcttgacctggcctctctctggtgccatggcaacattatgccccaaacttcttccctggttggagtgagaggggctgtccacagccccatcctgtggggatctcaagccggagtccctggcctggcctccttgacgtaggtgttctcagcaagcagtttgcatcccaccgtctttctcacacttgcccccaagacttttgacagagcagacgtaaaacaggactcagaaaaccatttttctctgttcccatatgtagtaagttttgattcagttgtgcataaaccatagttttctgccctgctgtttgctttcaatggaagacagtaaagggaagatggtgctcacatctctccatgtgacatctcattaggaattaagatgcgatggattagaaatgtaaaacttcagaataaaattaaatttcagggctctataagtcccgttttcccaggtcctgttccgtttctacgtagataacccaatttgttttgtctatgaaataagcctctttagtgggttgttttagtctctccaacaaaagagcagattcctaaagccaggtgcagcactgtgaaaagtttctttcaatatggcaccaagactctaccatttatgtctctctcagcttacaaacatcagcgttttgtccttgtcatagtggaagaaagacacttactttaagctttggggacaaaggtgacaaaccccaggcttttatcttaaaagtgtctttggcacttcttttggcactgaaatggtatttgggaagcattatttgaatgtacagttgtttggttttgtatgtgcttatctttatctgagctttcacttgtagacatggccttttgttgtgaagttgctcatcatttaggagtgtttaattctaaaaagccttcagcctaagaaagcttcatctgtggggaccagagacttgttgctcagggagttagtgatgggacttgggcatctgatctgcaggtgacaagtttagttcaactgaagttgtagggaatttagacagttgcacatcattgccgttctaggggccttgtagaaagatgaaacagttgtttttcatttaccagcacctctcagttatagaggtaatggaacattcgcttacttttcatcatcattctttaaaaagggaacatacaaaaatctaaactatggcaataatttatttttataatagtttacggtaggctttaattaaatggcaaactcctctgggacccctaagttatggcgtgattagccaaatttgatttccaacagtcatttatggccataactattgcatagagtgcaggatgccagcaaagatgagggtgggggcagatactggctcagtgatttaactcacattatagatgaccccttcctcaacagaaatgctactgagagaaccagagaggcctgggccaggcaggtcttatttgagaggagattatttgataattgctttggttagaaggactttacatttcctgatttcaagtccagcaccaatttagaaagttcagagatgaaaccacctgtctttacctgacagagtcataacggtttgtgtaaaaatgtggtcagggaccttttttgttctttctgattagttaatactgtacattgtaaccaggaggggcagttttgccaaccagcctctgctcatggtcaccatatgtgtatgacaaggcctgagtgagttcctgcataaactgggtagtgggctcttttgacacatttgcaagcatgtaaatgaatgaatgacactaccagcaaccatctgtacaggtccatttacttacattcataaggtttatgctatgaaacttcttctcattgtgatgtcagtaacagagttagtgtctctgatggaatagtgtacctgtcacccaagttattttgttcctttttgggtcctccagtataatccccccctcatcccaattaactgtaaaatgttttacacatcacattttttatactgtaaacttggaaaataaactgaaatatcaaattg

SEQ ID NO: 349 - DNA, 5415 bp, Homo sapiens
ggatcccgatctgattcctgatccttgattccttgatccttggtcccgccatgggagcctgagcgccccctattcccccctggcccccagcccccggggccttgagggggaagaggcagcggtctgggacggagcagggggtgaccagactcaagaacccccccctcaacatcccccatcgcgcgcgctgcctgtccaggagcgccgagttcggagcgacccggagcgctgcggatacaaaggcgacgggccgagcggggcgcccgcggagcccacccggcagttcgcagcggcgggagcgtcgctggattttctctgagacaagcccacccgtccagcaaaatagagtccctcagggtgacagttgacttcctgaaggtgcctcttggcctaaagaagccggtgctgaaggaggtggctgtggggccccccaagaggccccagcctgcggccctggagcgctacaaggcgcggcgttcagacgccatggacaccgagtcccagtactcgggctattcctacaagtcgggccactcccgcagctcccgcaagcacagggaccgccgggaccgacaccgctctaagagtcgagatgggggccgaggggacaagtcggtgacaatccaggctcccggggagcccctgctggacaatgagtccacacgaggggatgagcgggatgacaactggggggaaacgacgacagtagtaacgggcacctcagagcacagcatctcccatgatgacctcacacgcatcgccaaggacatggaggacagtgtccctctggactgctcccgtcacctgggtgtggcagcgggggccaccctggcactgctgtctttcctcacgcctctggccttcctgctgctgcccccactgctgtggcgggaggagctggagccttgcgggacggcctgcgagggcctcttcatctctgtcgccttcaagctgctcatcctgctactgggcagctgggctctgttcttccgccggcccaaggcctcgctgccccgcgtctttgtgctgcgtgccctgcttatggtgctggttttcctgctcgtggtctcctactggctcttctatggtgtgcgcatcctggatgctcgggagcgcagctaccagggcgtggtgcagttcgccgtgtcgctggtggacgcccttcttttcgtgcactacctggccgtggtcctgctggagctgcgccagctccagcctcagttcacgctcaaggtcgtgcgctccaccgacggcgccagccgcttctacaacgttggccatctcagcatccagcgcgtggcagtgtggatcctggagaagtattaccatgacttccctgtctacaaccctgccctcctcaacctgcccaagtccgtcctggccaagaaagtgtctggcttcaaggtgtattccctcggagaggaaaacagcaccaacaactccactggccagtctcgggctgtgattgcagcggcagctcggaggcgggacaacagtcacaatgagtactactatgaggaggctgagcatgagcgaagggtgcgcaagaggagggccaggcttgtagtggcggtggaggaggccttcactcacattaagcggctgcaggaagaggagcagaaaaaccccagggaggtgatggacccccgggaggcagcccaagccatctttgcatccatggcccgtgccatgcagaagtaccttcggaccaccaagcagcagccctaccacaccatggagagcatcctgcagcaccttgaattctgcatcacgcatgacatgacgcccaaggccttcttggagcgatacttggcggctggacctaccatccagtaccacaaggaacgctggctggccaaacagtggacattggtgagcgaggagccggtgaccaacggcctcaaggatggcatcgttttcctcttaaaacgccaggacttcagcctggtggtcagcaccaagaaggtcccattcttcaaactctccgaggaatttgtggatcccaagtcacacaagtttgtcatgaggctgcagtctgagacctcagtgtgactgtgcaacagcagggggagtgggaaactctggggggtcctgagggggtgggagggggcttggttctcaggcccagccacattcctgccacccttcttcttcttgctcttttttttttacttgaattaacgcacccccaccttctctcctcgcttcttccttattttaccccatgtgaacctggagagaccatcctgctgtcaacagtacctgggaaggactcccacctcaccaacaacttttgtattactctaggccctgcaggaatcagtgcctctctccctcttctttccctagtcttttcccagattacagtctctcctgaaagggcacagggccctgctgattgtactttcccctcctgagccccgactcacaaatccaagttcttaaaacatttctcttcagtggcccaacagggtttctctggggcacatggacatgactccagagagccacagtgccaaactcctccagggcagcaactggccctcctgtccctcaccccagccacaacaaaccctgggttctagggcagggatactcctgccacacagcccgagttagaaatctccttgctaggagcatttgcttccacatatatttagagcaaagaaggatcccatccttttcccagaaatctccacctaatgtttttggtttgtatggtcacgtgaccataggcaaccacgtggaaaccctctgtgaccacttttccagggacttaggggaaggtacctttcttccaatgtgtcttcctaggcagcccctgaggaggagggctgaatagatccctgaggttttggagagacccccatcactgactcctgctccctaaccctaccctcactttcgtccccgctcttcccagtgaaggatggtatgtagactcctgtacagacatagtggcttgcagaccctgacccagcccctgtggtcttagacaaatgtttttatttttgtcaccagccacccctgtcctgccgccttctctcgactccagagacctgttgcctcatctcttttggggaagagccggcagctcctcctcatcccctgccttaagtccagttctttgcctcaggggtctcgtttccttggccttccagggtccccaccccttttctccctgcctgattctctgagctctgggctccgtctgtattgggttgaggggcaaggattactgccttttgtaggtacttcacccctcaccccattttagcttccatagtctttgcaccaaatccaaattcttgataatttagatctcattttgagcaaaatttgctggccctctaataaatattttcaatataaatctgagcctttgactcagacatttttgccaaggagagtagaattaggaagtacccatatacatccagccaggatccacatggaggacctttctgatggctgcaatgactaggccattcctctgagtaactcacagtgtccttttgtaggcccttcttttccctgaaagactggttggtacttaccttgcagagcacatcctgggataagatccccagtgtctcccctgggaggctccccctctgtgtagcaccagccctgggaatgatggagcctagtgatcggggtttctcctgctgtcctttctgcaaaagttcacttgtttacccaccgcatgctagagaggagctcattggccaatgcttaccttgtccccaaaggggtgggttgtggagctcacttaggcagggcctctggctggggccagggttatgagataggcctgtatgaaatatgtcctgttctgggggtctgtctcttttcttctcttcaaaaactttgtgtcagagagtcccttctgagtcacataaatacctcactatcctggaaaacagggcctggatggtgactggggtcattgcctttgtggacaggatggagtgtggtgtggtctgaggagcaggttggggtgggggagagggaaaggatttgggatcttagttgctgccctaggttaggggctggggagtgtttattttaagatcctgccatgtttttaatcactgtgatttttttttcattcccctttcctaaaaaaaatttttttcctccaactctctaagcactaagggctgtgcctgagaatggtagcattttggtcttttgcttcagaactgtggtatctttgtcttttttcattattattattattattattattattattactattgttttttaaaatgtcaggatgaattgtcagacatatggccatgtgtttgtcctctgcttctcccctgtgggaagttgtctccatgctgtgaactgctgtggggtgtgcagctgactcagtccctctgagcagtttccccactgtgtctgtcccatcatgcgctggatctgctcattctcctgctgtgggggtatgcccacctcttacccccttgacaccatagggctgctgtggctgggcctcaccagcactgtcttttgtgtgactcatggcatcctcgttcatccccaccgtgcctagcaggccttccttttcaccacctcggaacgcttgcctttcctccctccacaacaggacgctgtgcctcagtccttcacctacctcgccactctgccactgtccccattggtcctttctcctaaactggtctttgtgctctctttgttttttcttatttccctcttgtctctcattttttcttcccattcccctcccatttcagcccttaacttttctctttcccatctccactcagtattccaatggcaaaccctgatgatgtaacacctgcgatgagacatcggactctccggaactttctcatctgacacgtctttttcccagggttcgtacttctcctccattggtcccaggctaactcccctgttcctctgtggtgtctgtcagtccgtctgtcttctctttcctctgcccttcccacagggcagtatctgctgatggattcagtcctggtgtgtgattgttgtgatttgttcttccgtgcgcaaaaggaagagggctttttgagtcccttccaagtgagattgtaaatgtagaattttccactgttggatctagattttttttccttttttttgggggggtggggttacagagctgagaccttgtgcatgcatgtagaaaattgtaaaatgtaaattttttttaatatataaaaagcttgtttctacagtttgcagtggatctaaacattacggcaattttaggatttttttcttaaacataggaactaaaactgtacaaattttttttatataaaataaagacatttgacttttgtgggaaaaaaaaaaaaaaaaaaaaaaaaaaaaaaaaaaaaaaaaaaaaaaaaaaaaaaaaaaaaaaaaaaa

SEQ ID NO: 350 - DNA, 2888 bp, Homo sapiens
actagctgtcgctccacaggcgagcagggcaggcgtgcgggcgggtgggtggtggaggctgcgagggtgcacggccggccctgggcaggcggtagccatggagctgtggcgccaatgcacccactggctcatccagtgccgggtgctgccgcccagccaccgcgtgacctgggatggggctcaggtgtgtgaactggcccaggccctccgggatggtgtccttctgtgtcagctgcttaacaacctgctaccccatgccatcaacctgcgtgaggtcaacctgcgcccccagatgtcccagttcctgtgccttaagaacattagaaccttcctgtccacctgctgtgagaagttcggcctcaagcggagcgagctcttcgaagcctttgacctcttcgatgtgcaggattttggcaaggtcatctacaccctgtctgctctgtcctggaccccgatcgcccagaacagggggatcatgcccttccccaccgaggaggagagtgtaggtgatgaagacatctacagtggcctgtccgaccagatcgacgacacggtggaggaggatgaggacctgtatgactgcgtggagaatgaggaggcggaaggcgacgagatctatgaggacctcatgcgctcggagcccgtgtccatgccgcccaagatgacagagtatgacaagcgctgctgctgcctgcgggagatccagcagacggaggagaagtacactgacacgctgggctccatccagcagcatttcttgaagcccctgcaacggttcctgaaacctcaagacattgagatcatctttatcaacattgaggacctgcttcgtgttcatactcacttcctaaaggagatgaaggaagccctgggcacccctggcgcagccaatctctaccaggtcttcatcaaatacaaggagaggttcctcgtctatggccgctactgcagccaggtggagtcagccagcaaacacctggaccgtgtggccgcagcccgggaggacgtgcagatgaagctggaggaatgttctcagagagccaacaacgggaggttcaccctgcgggacctgctgatggtgcctatgcagcgagttctcaaatatcacctccttctccaggagctggtgaaacacacgcaggaggcgatggagaaggagaacctgcggctggccctggatgccatgagggacctggctcagtgcgtgaacgaggtcaagcgagacaacgagacactgcgacagatcaccaatttccagctgtccattgagaacctggaccagtctctggctcactatggccggcccaagatcgacggggaactcaagatcacctcggtggaacggcgctccaagatggacaggtatgccttcctgctcgacaaagctctactcatctgtaagcgcaggggagactcctatgacctcaaggactttgtaaacctgcacagcttccaggttcgggatgactcttcaggagaccgagacaacaagaagtggagccacatgttcctcctgatcgaggaccaaggtgcccagggctatgagctgttcttcaagacaagagaattgaagaagaagtggatggagcagtttgagatggccatctccaacatctatccggagaatgccaccgccaacgggcatgacttccagatgttctcctttgaggagaccacatcctgcaaggcctgtcagatgctgcttagaggtaccttctatcagggctaccgctgccatcggtgccgggcatctgcacacaaggagtgtctggggagggtccctccatgtggccgacatgggcaagatttcccaggaactatgaagaaggacaaactacatcgcagggctcaggacaaaaagaggaatgagctgggtctgcccaagatggaggtgtttcaggaatactacgggcttcctccaccccctggagccattggaccctttctacggctcaaccctggagacattgtggagctcacgaaggctgaggctgaacagaactggtgggagggcagaaatacatctactaatgaaattggctggtttccttgtaacagggtgaagccctatgtccatggccctcctcaggacctgtctgttcatctctggtacgcaggccccatggagcgggcaggggcagagagcatcctggccaaccgctcggacgggactttcttggtgcggcagagggtgaaggatgcagcagaatttgccatcagcattaaatataacgtcgaggtcaagcacattaaaatcatgacagcagaaggactgtaccggatcacagagaaaaaggctttccgggggcttacggagctggtggagttttaccagcagaactctctaaaggattgcttcaagtctctggacaccaccttgcagttccccttcaaggagcctgaaaagagaaccatcagcaggccagcagtgggaagcacaaagtattttggcacagccaaagcccgctatgacttctgcgcccgagaccgatcagagctgtcgctcaaggagggtgacatcatcaagatccttaacaagaagggacagcaaggctggtggcgaggggagatctatggccgggttggctggttccctgccaactacgtggaggaagattattctgaatactgctgagccctggtgccttggcagagagacgagaaactccaggctctgagcccggcgtgggcaggcagcggagccaggggctgtgacagctcccggcgggtggagactttgggatggactggaggagcgcagcgtccagctggcggtgctcccgggatgtgccctgacatggttaatttataacaccccgatttcctcttgggtcccctcaagcagacggggctcaagggggttacatttaataaaaggatgaagatgg

SEQ ID NO: 351 - DNA, 5443 bp, Homo sapiens
gtagtcgctgcacagtctgtctcttcgccggttcccggccccgtggatcctacttctctgtcgcccgcggttcgccgccccgctcgccgccgcgatgccagtgtttcatacgcgcacgatcgagagcatcctggagccggtggcacagcagatctcccacctggtgataatgcacgaggagggcgaggtggacggcaaagccattcctgacctcaccgcgcccgtggccgccgtgcaggcggccgtcagcaacctcgtccgggttggaaaagagactgttcaaaccactgaggatcagattttgaagagagatatgccaccagcatttattaaggttgagaatgcttgcaccaagcttgtccaggcagctcagatgcttcagtcagacccttactcagtgcctgctcgagattatctaattgatgggtcaaggggcatcctctctggaacatcagacctgctccttaccttcgatgaggctgaggtccgtaaaattattagagtttgcaaaggaattttggaatatcttacagtggcagaggtggtggagactatggaagatttggtcacttacacaaagaatcttgggccaggaatgactaagatggccaagatgattgacgagagacagcaggagctcactcaccaggagcaccgagtgatgttggtgaactcgatgaacaccgtgaaagagttgctgccagttctcatttcagctatgaagatttttgtaacaactaaaaactcaaaaaaccaaggcatagaggaagctttaaaaaatcgcaattttactgtagaaaaaatgagtgctgaaattaatgagataattcgtgtgttacaactcacctcttgggatgaagatgcctgggccagcaaggacactgaagccatgaagagagcattggcctccatagactccaaactgaaccaggccaaaggttggctccgtgaccctagtgcctccccaggggatgctggtgagcaggccatcagacagatcttagatgaagctggaaaagttggtgaactctgtgcaggcaaagaacgcagggagattctgggaacttgcaaaatgctagggcagatgactgatcaagtggctgacctccgtgccagaggacaaggatcctcaccggtggccatgcagaaagctcagcaggtatctcagggtctggatgtgctcacagcaaaagtggaaaatgcagctcgcaagctggaagccatgaccaactcaaagcagagcattgcaaagaagatcgatgctgctcagaactggcttgcagatccaaatggtggaccggaaggagaagagcagattcgaggtgctttggctgaagctcggaaaatagcagaattatgtgatgatcctaaagaaagagatgacattctacgttcccttggggaaatatctgctctgacttctaaattagcagatctacgaagacaggggaaaggagattctccagaggctcgagccttggccaaacaggtggccacggccctgcagaacctgcagaccaaaaccaaccgggctgtggccaacagcagaccggccaaagcagctgtacaccttgagggcaagattgagcaagcacagcggtggattgataatcccacagtggatgaccgtggagtcggtcaggctgccatccgggggcttgtggccgaagggcatcgtctggctaatgttatgatggggccttatcggcaagatcttctcgccaagtgtgaccgagtggaccagctgacagcccagctggctgacctggctgccagaggggaaggggagagtcctcaggcacgagcacttgcatctcagctccaagactccttaaaggatctaaaagctcggatgcaggaggccatgactcaggaagtgtcagatgttttcagcgataccacaactcccatcaagctgttggcagtggcagccacggcgcctcctgatgcgcctaacagggaagaggtatttgatgagagggcagctaactttgaaaaccattcaggaaagcttggtgctacggccgagaaggcggctgcggttggtactgctaataaatcaacagtggaaggcattcaggcctcagtgaagacggcccgagaactcacaccccaggtggtctcggctgctcgtatcttacttaggaaccctggaaatcaagctgcttatgaacattttgagaccatgaagaaccagtggatcgataatgttgaaaaaatgacagggctggtggacgaagccattgataccaaatctctgttggatgcttcagaagaagcaattaaaaaagacctggacaagtgcaaggtagctatggccaacattcagcctcagatgctggttgctggggcaaccagtattgctcgtcgggccaaccggatcctgctggtggctaagagggaggtggagaattccgaggatcccaagttccgtgaggctgtgaaagctgcctctgatgaattgagcaaaaccatctccccgatggtgatggatgcaaaagctgtggctggaaacatttccgaccctggactgcaaaagagcttcctggactcaggatatcggatcctgggagctgtggccaaggtcagagaagccttccaacctcaggagcctgacttcccgccgcctccaccagaccttgaacaactccgactaacagatgagcttgctcctcccaaaccacctctgcctgaaggtgaggtccctccacctaggcctccaccaccagaggaaaaggatgaagagttccctgagcagaaggccggggaggtgattaaccagccaatgatgatggctgccagacagctccatgatgaagctcgcaaatggtccagcaagggcaatgacatcattgcagcagccaagcgcatggctctgctgatggctgagatgtctcggctggtaagagggggcagtggtaccaagcgggcactcattcagtgtgccaaggacatcgccaaggcctcagatgaggtgactcggttggccaaggaggttgccaagcagtgcacagataaacggattagaaccaacctcttacaggtatgtgagcgaatcccaaccataagcacccagctcaaaatcctgtccacagtgaaggccaccatgctgggccggaccaacatcagtgatgaggagtctgagcaggccacagagatgctggttcacaatgcccagaacctcatgcagtctgtgaaggagactgtgcgggaagctgaagctgcttcaatcaaaattcgaacagatgctggatttacactgcgctgggttagaaagactccctggtaccagtaggcacctggctgagcctggctggcacagaaacctctactaaaaagaaggaaaatgatctgagtcccaggagctgcccagagttgctgggagctgaaaaatcacatcctggcctggcacatcagaaaggaatgggggcctcttcaaattagaagacatttatactcttttttcatggacactttgaaatgtgtttctgtataaagcctgtattctcaaacacagttacacttgtgcaccctctatcccaataggcagactgggtttctagcccatggacttcacataagctcagaatccaagtgaacactagccagacactctgctctgcccttgttccctaggggacacttccctctgtttctctttccttggctcccattcactcttccagaatcccaagacccagggcccaggcaaatcagttactaagaagaaaattgctgtgcctcccaaaattgttttgagctttccatgttgctgccaaccataccttccttccctgggctgtgctacctgggtccttttcagaagtgagctttgctgctacaggggaaggtggcctctgtggagccccagcatatgggggcctggattcatttcctgcccttcctcagtttaatccttctagtttcccacaatataaaactgtacttcactgtcaggaagaaatcacagaatcatatgattctgcttttaccatgcccctgagcaatgtctgtgctagggaaacttcccgtcccatatcctgcctcagcccgccaaggtagccatcccatgaacacactgtgtcctggtgctctctgccactggaagggcagagtagccagggtgtggccctgccatcttcccagcagggccactcccggcactccatgcttagtcactgcctgcagaggtctgtgctgaggccttatcattcattcttagctcttaattgttcattttgagctgaaatgctgcattttaattttaaccaaaacatgtctcctatcctggtttttgtagccttcctccacatcctttctaaacaagattttaaagacatgtaggtgtttgttcatctgtaactctaaaagatcctttttaaattcagtcctaagaaagaggagtgcttgtcccctaagagtgtttaatggcaaggcagccctgtctgaaggacacttcctgcctaagggagagtggtatttgcagactagaattctagtgctgctgaagatgaatcaatgggaaatactactcctgtaattcctacctccctgcaaccaactacaaccaagctctctgcatctactcccaagtatggggttcaagagagtaatgggtttcatatttcttatcaccacagtaagttcctactaggcaaaatgagagggcagtgtttcctttttggtacttattactgctaagtatttcccagcacatgaaaccttattttttcccaaagccagaaccagatgagtaaaggagtaagaaccttgcctgaacatccttccttcccacccatcgctgtgtgttagttcccaacatcgaatgtgtacaacttaagttggtcctttacactcaggctttcactatttcctttataatgaggatgattattttcaaggccctcagcatatttgtatagttgcttgcctgatataaatgcaatattaatgcctttaaagtatgaatctatgccaaagatcacttgttgttttactaaagaaagattacttagaggaaataagaaaaatcatgtttgctctcccggttcttccagtggtttgagacactggtttacactttatgccggatgtgcttttctccaatatcagtgctcgagacacagtgaagcaaattaaaaaaaaaaaaaaaaaaaatccctgaatgatgattagagacatcaccgctaaaaaactacatttataagctaggatttgttatatgcaaatattttctgcctcttcttttgttctgtttaaaacaataaaatgcatttgtataaaaaaaaaaaaaaaaaaaaaaaaaaaaaaaaaaaaaaaaaaaaaaaaaaaaaaaaaaaaaaaaaaaaaaaaaaaaaaaaaaaaaaaaaaaaaaaaaaaaaaaaaaaaaaaaaaaaaaaaaaaaaaaaaaaaaaaaaaaaaaaaaaaaaaaaaaaaaaaaaaa

SEQ ID NO: 352 - DNA, 3542 bp, Homo sapiens
ggcttggggcagccgggtagctcggaggtcgtggcgctgggggctagcaccagcgctctgtcgggaggcgcagcggttaggtggaccggtcagcggactcaccggccagggcgctcggtgctggaatttgatattcattgatccgggttttatccctcttcttttttcttaaacatttttttttaaaactgtattgtttctcgttttaatttatttttgcttgccattccccacttgaatcgggccgacggcttggggagattgctctacttccccaaatcactgtggattttggaaaccagcagaaagaggaaagaggtagcaagagctccagagagaagtcgaggaagagagagacggggtcagagagagcgcgcgggcgtgcgagcagcgaaagcgacaggggcaaagtgagtgacctgcttttgggggtgaccgccggagcgcggcgtgagccctcccccttgggatcccgcagctgaccagtcgcgctgacggacagacagacagacaccgcccccagccccagctaccacctcctccccggccggcggcggacagtggacgcggcggcgagccgcgggcaggggccggagcccgcgcccggaggcggggtggagggggtcggggctcgcggcgtcgcactgaaacttttcgtccaacttctgggctgttctcgcttcggaggagccgtggtccgcgcgggggaagccgagccgagcggagccgcgagaagtgctagctcgggccgggaggagccgcagccggaggagggggaggaggaagaagagaaggaagaggagagggggccgcagtggcgactcggcgctcggaagccgggctcatggacgggtgaggcggcggtgtgcgcagacagtgctccagccgcgcgcgctccccaggccctggcccgggcctcgggccggggaggaagagtagctcgccgaggcgccgaggagagcgggccgccccacagcccgagccggagagggagcgcgagccgcgccggccccggtcgggcctccgaaaccatgaactttctgctgtcttgggtgcattggagccttgccttgctgctctacctccaccatgccaagtggtcccaggctgcacccatggcagaaggaggagggcagaatcatcacgaagtggtgaagttcatggatgtctatcagcgcagctactgccatccaatcgagaccctggtggacatcttccaggagtaccctgatgagatcgagtacatcttcaagccatcctgtgtgcccctgatgcgatgcgggggctgctgcaatgacgagggcctggagtgtgtgcccactgaggagtccaacatcaccatgcagattatgcggatcaaacctcaccaaggccagcacataggagagatgagcttcctacagcacaacaaatgtgaatgcagaccaaagaaagatagagcaagacaagaaaatccctgtgggccttgctcagagcggagaaagcatttgtttgtacaagatccgcagacgtgtaaatgttcctgcaaaaacacagactcgcgttgcaaggcgaggcagcttgagttaaacgaacgtacttgcagatgtgacaagccgaggcggtgagccgggcaggaggaaggagcctccctcagggtttcgggaaccagatctctcaccaggaaagactgatacagaacgatcgatacagaaaccacgctgccgccaccacaccatcaccatcgacagaacagtccttaatccagaaacctgaaatgaaggaagaggagactctgcgcagagcactttgggtccggagggcgagactccggcggaagcattcccgggcgggtgacccagcacggtccctcttggaattggattcgccattttatttttcttgctgctaaatcaccgagcccggaagattagagagttttatttctgggattcctgtagacacacccacccacatacatacatttatatatatatatattatatatatataaaaataaatatctctattttatatatataaaatatatatattctttttttaaattaacagtgctaatgttattggtgtcttcactggatgtatttgactgctgtggacttgagttgggaggggaatgttcccactcagatcctgacagggaagaggaggagatgagagactctggcatgatcttttttttgtcccacttggtggggccagggtcctctcccctgcccaggaatgtgcaaggccagggcatgggggcaaatatgacccagttttgggaacaccgacaaacccagccctggcgctgagcctctctaccccaggtcagacggacagaaagacagatcacaggtacagggatgaggacaccggctctgaccaggagtttggggagcttcaggacattgctgtgctttggggattccctccacatgctgcacgcgcatctcgcccccaggggcactgcctggaagattcaggagcctgggcggccttcgcttactctcacctgcttctgagttgcccaggagaccactggcagatgtcccggcgaagagaagagacacattgttggaagaagcagcccatgacagctccccttcctgggactcgccctcatcctcttcctgctccccttcctggggtgcagcctaaaaggacctatgtcctcacaccattgaaaccactagttctgtccccccaggagacctggttgtgtgtgtgtgagtggttgaccttcctccatcccctggtccttcccttcccttcccgaggcacagagagacagggcaggatccacgtgcccattgtggaggcagagaaaagagaaagtgttttatatacggtacttatttaatatccctttttaattagaaattaaaacagttaatttaattaaagagtagggttttttttcagtattcttggttaatatttaatttcaactatttatgagatgtatcttttgctctctcttgctctcttatttgtaccggtttttgtatataaaattcatgtttccaatctctctctccctgatcggtgacagtcactagcttatcttgaacagatatttaattttgctaacactcagctctgccctccccgatcccctggctccccagcacacattcctttgaaataaggtttcaatatacatctacatactatatatatatttggcaacttgtatttgtgtgtatatatatatatatatgtttatgtatatatgtgattctgataaaatagacattgctattctgttttttatatgtaaaaacaaaacaagaaaaaatagagaattctacatactaaatctctctccttttttaattttaatatttgttatcatttatttattggtgctactgtttatccgtaataattgtggggaaaagatattaacatcacgtctttgtctctagtgcagtttttcgagatattccgtagtacatatttatttttaaacaacgacaaagaaatacagatatatcttaaaaaaaaaaaagcattttgtattaaagaatttaattctgatctcaaaaaaaaaaaaa

SEQ ID NO: 353 - DNA, 1847 bp, Homo sapiens
gtccccgcgccagagacgcagccgcgctcccaccacccacacccaccgcgccctcgttcgcctcttctccgggagccagtccgcgccaccgccgccgcccaggccatcgccaccctccgcagccatgtccaccaggtccgtgtcctcgtcctcctaccgcaggatgttcggcggcccgggcaccgcgagccggccgagctccagccggagctacgtgactacgtccacccgcacctacagcctgggcagcgcgctgcgccccagcaccagccgcagcctctacgcctcgtccccgggcggcgtgtatgccacgcgctcctctgccgtgcgcctgcggagcagcgtgcccggggtgcggctcctgcaggactcggtggacttctcgctggccgacgccatcaacaccgagttcaagaacacccgcaccaacgagaaggtggagctgcaggagctgaatgaccgcttcgccaactacatcgacaaggtgcgcttcctggagcagcagaataagatcctgctggccgagctcgagcagctcaagggccaaggcaagtcgcgcctgggggacctctacgaggaggagatgcgggagctgcgccggcaggtggaccagctaaccaacgacaaagcccgcgtcgaggtggagcgcgacaacctggccgaggacatcatgcgcctccgggagaaattgcaggaggagatgcttcagagagaggaagccgaaaacaccctgcaatctttcagacaggatgttgacaatgcgtctctggcacgtcttgaccttgaacgcaaagtggaatctttgcaagaagagattgcctttttgaagaaactccacgaagaggaaatccaggagctgcaggctcagattcaggaacagcatgtccaaatcgatgtggatgtttccaagcctgacctcacggctgccctgcgtgacgtacgtcagcaatatgaaagtgtggctgccaagaacctgcaggaggcagaagaatggtacaaatccaagtttgctgacctctctgaggctgccaaccggaacaatgacgccctgcgccaggcaaagcaggagtccactgagtaccggagacaggtgcagtccctcacctgtgaagtggatgcccttaaaggaaccaatgagtccctggaacgccagatgcgtgaaatggaagagaactttgccgttgaagctgctaactaccaagacactattggccgcctgcaggatgagattcagaatatgaaggaggaaatggctcgtcaccttcgtgaataccaagacctgctcaatgttaagatggcccttgacattgagattgccacctacaggaagctgctggaaggcgaggagagcaggatttctctgcctcttccaaacttttcctccctgaacctgagggaaactaatctggattcactccctctggttgatacccactcaaaaaggacacttctgattaagacggttgaaactagagatggacaggttatcaacgaaacttctcagcatcacgatgaccttgaataaaaattgcacacactcagtgcagcaatatattaccagcaagaataaaaaagaaatccatatcttaaagaaacagctttcaagtgcctttctgcagtttttcaggagcgcaagatagatttggaataggaataagctctagttcttaacaaccgacactcctacaagatttagaaaaaagtttacaacataatctagtttacagaaaaatcttgtgctagaatactttttaaaaggtattttgaataccattaaaactgcttttttttttccagcaagtatccaaccaacttggttctgcttcaataaatctttggaaaaactc

SEQ ID NO: 354 - DNA, 1678 bp, Homo sapiens
gagcaaacagagcagcagaaaaggcagttcctcttctccagtgccctccttccctgtctctgcctctccctcccttcctcaggcatcagagcggagacttcagggagaccagagcccagcttgccaggcactgagctagaagccctgccatggcacccctgagaccccttctcatactggccctgctggcatgggttgctctggctgaccaagagtcatgcaagggccgctgcactgagggcttcaacgtggacaagaagtgccagtgtgacgagctctgctcttactaccagagctgctgcacagactatacggctgagtgcaagccccaagtgactcgcggggatgtgttcactatgccggaggatgagtacacggtctatgacgatggcgaggagaaaaacaatgccactgtccatgaacaggtggggggcccctccctgacctctgacctccaggcccagtccaaagggaatcctgagcagacacctgttctgaaacctgaggaagaggcccctgcgcctgaggtgggcgcctctaagcctgaggggatagactcaaggcctgagacccttcatccagggagacctcagcccccagcagaggaggagctgtgcagtgggaagcccttcgacgccttcaccgacctcaagaacggttccctctttgccttccgagggcagtactgctatgaactggacgaaaaggcagtgaggcctgggtaccccaagctcatccgagatgtctggggcatcgagggccccatcgatgccgccttcacccgcatcaactgtcaggggaagacctacctcttcaagggtagtcagtactggcgctttgaggatggtgtcctggaccctgattacccccgaaatatctctgacggcttcgatggcatcccggacaacgtggatgcagccttggccctccctgcccatagctacagtggccgggagcgggtctacttcttcaaggggaaacagtactgggagtaccagttccagcaccagcccagtcaggaggagtgtgaaggcagctccctgtcggctgtgtttgaacactttgccatgatgcagcgggacagctgggaggacatcttcgagcttctcttctggggcagaacctctgctggtaccagacagccccagttcattagccgggactggcacggtgtgccagggcaagtggacgcagccatggctggccgcatctacatctcaggcatggcaccccgcccctccttggccaagaaacaaaggtttaggcatcgcaaccgcaaaggctaccgttcacaacgaggccacagccgtggccgcaaccagaactcccgccggccatcccgcgccacgtggctgtccttgttctccagtgaggagagcaacttgggagccaacaactatgatgactacaggatggactggcttgtgcctgccacctgtgaacccatccagagtgtcttcttcttctctggagacaagtactaccgagtcaatcttcgcacacggcgagtggacactgtggaccctccctacccacgctccatcgctcagtactggctgggctgcccagctcctggccatctgtaggagtcagagcccacatggccgggccctctgtagctccctcctcccatctccttcccccagcccaataaaggtcccttagccccgagtttaaa

SEQ ID NO: 355 - DNA, 4430 bp, Homo sapiens
ggattgtgcggccgccgccgccgctgcgggagggttgggggaggagttgggagtttagcgcagtcgccggagtgcgaggacaacgaccatccggccctagcctggccgggcgggtgccgggagcttccctttctcagcgcggcgcgaaggtggctcgccgtcagcgcctgcttccctcgacctcgtcctcctccccgctccggaggagctgcgagatgtggcgcctctgactccacttctccccgcccctgtcaccgagagggggaacgagctctcgcccactcgccggaggagacggccctggactcccaaccccgccggcgaaaccatgagctccgtccagcagcagccgccgccgccgcggagggtcaccaacgtggggtccctgttgctcaccccgcaggagaacgagtccctcttcactttcctcggcaagaaatgtgtgactatgtcttcagcagtggtgcagttatatgcagcagatcggaactgtatgtggtcaaagaagtgcagtggtgttgcttgtcttgttaaggacaatccacagagatcttattttttaagaatatttgacattaaggatgggaaactattgtgggaacaagagctatacaataactttgtatataatagtcctagaggatattttcatacctttgctggagatacttgtcaagttgctcttaattttgccaatgaagaagaagcaaaaaaatttcgaaaagcagttacagaccttttgggccgtcgacaaaggaaatctgagaaaagacgagatcccccaaatggtcctaatctacccatggctacagttgatataaaaaatccagaaatcacaacaaatagattttatggtccacaagtcaacaacatctcccataccaaagaaaagaagaagggaaaagctaaaaagaagagattaaccaaggcagatataggaacaccaagcaatttccagcacattggacatgttggttgggatccaaatacaggctttgatctgaataatttggatccagaattgaagaatcttttcgatatgtgtggaatctcagaggcacaacttaaagacagagaaacatcaaaagttatatatgactttattgaaaaaacaggaggtgttgaagctgttaaaaatgaactgcggaggcaagcaccaccacctccaccaccatcaaggggagggccacctcctcctcctccccctccacacaactcaggtcctcctcctcctcctgctaggggaagaggcgctcctcccccaccaccttcaagagctcccacagctgcacctccaccaccgcctccttccaggccaagtgtagcagtccctccaccaccgccaaataggatgtaccctcctccacctccagcccttccctcctcagcaccttcagggcctccaccaccacctccatctgtgttgggggtagggccagtggcaccacccccaccgcctccacctccacctcctcctgggccaccgcccccgcctggcctgccttctgatggggaccatcaggttccaactactgcaggaaacaaagcagctcttttagatcaaattagagagggtgctcagctaaaaaaagtggagcagaacagtcggccagtgtcctgctctggacgagatgcactgttagaccagatacgacagggtatccaactaaaatctgtggctgatggccaagagtctacaccaccaacacctgcacccacttcaggaattgtgggtgcattaatggaagtgatgcagaaaaggagcaaagccattcattcttcagatgaagatgaagatgaagatgatgaagaagattttgaggatgatgatgagtgggaagactgatctatatattatatatatatatatatttttaaggtgaaatactaaacactactttctgtctgtggattctgtaaaattatcatgtaaatgttctaccaatttgctgtatatttttgttgccttttttgcttttttttaatctgtgcaatacctcatttaatctgtaaaggtttgtcgtaatcctctacaaagctactccctgttattgtgtgcaagtttacaccaggatgctcacttgatttgtgaatatttttcattccatcaacaagggagtttaaatactatatgtgagactgacaaaaaccttaatgtaatttacttataatgccagaaggaaaacactattttcataccctactttttctgtacctaaattttcttaaaaaaaaatctagtatagcactacattcttttttaagtgatgcagaccttagtttctttagcccctttattttgaatacaatgctacatatgaatgttgaagctgatacattgcacagttctgtagacatcactacaccgatgtagtttctcaaattttagcaatatgctctacataaaatcactacagagatactagtggggaagacgattaacacacctcttacagtaatactgcctgttattggtatagcagtggtatttgcagactgggatcataaggagcccttaaatacttgttattgactggggttatttttatgctgtagcaaatgtgacaggctctttttagcaaaatttttgaaaatttttttggtattactctgaaacaaaatttaagttggagtttcagggatttagggagtagttttcattctacatgaactgaggtaatattatggtaactccaatatttggttaaaaaaactatacaaatcagaatagtactaaaatactgtagaattttagcatttttattttgcactttgtgtggattgaggtgttcagaaataccaaccataaaaatgtaatctagttggcaaaggtgtgcgctaaaacacggaaccgaacatgcattgatttggataacttttgagggtttttgtcaaatagcatgtgaagagttacatttttcttaaaagattggtggtcccaatgtcagagttcttggaacagataactgaatgatagattttttttttttaaagataaaactttacaacctgcacatttgttatgcatactaaatggtgtgttaaaattagggtttctttgcctctctacactacactaatctgcctaaaggtggttgtttcatatttataatgctaattatcatacctacctactttaaattttaggtagaaaattatctgatttaaatacaaacatatttttctcacattgagtaatatgcataatgtagttccaaatgtatttcattactatagtcacaatatccaactaaaaattacgctatctagaattgtaccaaccaaaatctcgtattggcagatcttgacaggctggacctgcaagatgtggcttgaattttaaccatttattacataatctctagtgatcatgcatctagttatcataagaaataatttaaaaggttttgttgctgaaagcagtaagtggtgcagtaaaatacttaagttattcaaagaatgttatctttcttgcaagagtaatttaagcacatgggaaagattctagactttttgtttcttgcaacaacagtgccctctgctgctagaaacctttttctacttactatcatttttattgtggcttgagctcagtcaatctggtgcagatgaggctggacaactactaaccaataaaatcaggagtttgtacaaaagttaaatggaacattataattattttaagtaatgttaattgaaaaaattttttctttttgacaatataaaaaacattttaaatttcctagaaatgtcttcagggtaatgccaatttaagatctctcttaacttgtggccaagaaattctagattttccagctgactttggtataatatatatttatcaggaacttctctcagcagagagtacccattcttcgagttcaaagcacaattttaaacatgtaaaatggatatataatttgccaaaggtaattaatttattctttttttcttaaagaagaaaaagacattggttgttgttacaaaaagtctaaattactgttggttgaaacacagcagctgtggagttcagtccaggcatgaagactaaatctgctttaccaagtaaggtgtaaggttgcatgtttcagtcctctaccatcctgcactgtgagcagcactatacctgtgcgttgtctgaaagccttccgtatattctccagctaaatggtcgtctggtagcctttgcatttaacaaactagcatgaggctttttatatctaaatgctacgtgatagacaatttcagctagccacatattgtatgtatgagattcataaagactttcaatcatttcattttcagacaactgaaattttgtttagtatgtgaattctttttttgaaatgtatagtgaataggatgttgcactggtggcaattcatcatggagcataataaaattaatttgacccaaatagaaaaaaaaaa

SEQ ID NO: 356 - DNA, 2026 bp, Homo sapiens
ccaggccgggaggcgacgcgcccagccgtctaaacgggaacagccctggctgagggagctgcagcgcagcagagtatctgacggcgccaggttgcgtaggtgcggcacgaggagttttcccggcagcgaggaggtcctgagcagcatggcccggaggagcgccttccctgccgccgcgctctggctctggagcatcctcctgtgcctgctggcactgcgggcggaggccgggccgccgcaggaggagagcctgtacctatggatcgatgctcaccaggcaagagtactcataggatttgaagaagatatcctgattgtttcagaggggaaaatggcaccttttacacatgatttcagaaaagcacaacagagaatgccagctattcctgtcaatatccattccatgaattttacctggcaagctgcagggcaggcagaatacttctatgaattcctgtccttgcgctccctggataaaggcatcatggcagatccaaccgtcaatgtccctctgctgggaacagtgcctcacaaggcatcagttgttcaagttggtttcccatgtcttggaaaacaggatggggtggcagcatttgaagtggatgtgattgttatgaattctgaaggcaacaccattctccaaacacctcaaaatgctatcttctttaaaacatgtcaacaagctgagtgcccaggcgggtgccgaaatggaggcttttgtaatgaaagacgcatctgcgagtgtcctgatgggttccacggacctcactgtgagaaagccctttgtaccccacgatgtatgaatggtggactttgtgtgactcctggtttctgcatctgcccacctggattctatggagtgaactgtgacaaagcaaactgctcaaccacctgctttaatggagggacctgtttctaccctggaaaatgtatttgccctccaggactagagggagagcagtgtgaaatcagcaaatgcccacaaccctgtcgaaatggaggtaaatgcattggtaaaagcaaatgtaagtgttccaaaggttaccagggagacctctgttcaaagcctgtctgcgagcctggctgtggtgcacatggaacctgccatgaacccaacaaatgccaatgtcaagaaggttggcatggaagacactgcaataaaaggtacgaagccagcctcatacatgccctgaggccagcaggcgcccagctcaggcagcacacgccttcacttaaaaaggccgaggagcggcgggatccacctgaatccaattacatctggtgaactccgacatctgaaacgttttaagttacaccaagttcatagcctttgttaacctttcatgtgttgaatgttcaaataatgttcattacacttaagaatactggcctgaattttattagcttcattataaatcactgagctgatatttactcttccttttaagttttctaagtacgtctgtagcatgatggtatagattttcttgtttcagtgctttgggacagattttatattatgtcaattgatcaggttaaaattttcagtgtgtagttggcagatattttcaaaattacaatgcatttatggtgtctgggggcaggggaacatcagaaaggttaaattgggcaaaaatgcgtaagtcacaagaatttggatggtgcagttaatgttgaagttacagcatttcagattttattgtcagatatttagatgtttgttacatttttaaaaattgctcttaatttttaaactctcaatacaatatattttgaccttaccattattccagagattcagtattaaaaaaaaaaaaattacactgtggtagtggcatttaaacaatataatatattctaaacacaatgaaatagggaatataatgtatgaactttttgcattggcttgaagcaatataatatattgtaaacaaaacacagctcttacctaataaacattttatactgtttgtatgtataaaataaaggtgctgctttagttttctgaaaaaaaaaaaaaaaaaaa

SEQ ID NO: 357 - DNA, 2819 bp, Homo sapiens
ctgggcccagctcccccgagaggtggtcggatcctctgggctgctcggtcgatgcctgtgccactgacgtccaggcatgaggtggttcctgccctggacgctggcagcagtgacagcagcagccgccagcaccgtcctggccacggccctctctccagcccctacgaccatggactttaccccagctccactggaggacacctcctcacgcccccaattctgcaagtggccatgtgagtgcccgccatccccaccccgctgcccgctgggggtcagcctcatcacagatggctgtgagtgctgtaagatgtgcgctcagcagcttggggacaactgcacggaggctgccatctgtgacccccaccggggcctctactgtgactacagcggggaccgcccgaggtacgcaataggagtgtgtgcacaggtggtcggtgtgggctgcgtcctggatggggtgcgctacaacaacggccagtccttccagcctaactgcaagtacaactgcacgtgcatcgacggcgcggtgggctgcacaccactgtgcctccgagtgcgccccccgcgtctctggtgcccccacccgcggcgcgtgagcatacctggccactgctgtgagcagtgggtatgtgaggacgacgccaagaggccacgcaagaccgcaccccgtgacacaggagccttcgatgctgtgggtgaggtggaggcatggcacaggaactgcatagcctacacaagcccctggagcccttgctccaccagctgcggcctgggggtctccactcggatctccaatgttaacgcccagtgctggcctgagcaagagagccgcctctgcaacttgcggccatgcgatgtggacatccatacactcattaaggcagggaagaagtgtctggctgtgtaccagccagaggcatccatgaacttcacacttgcgggctgcatcagcacacgctcctatcaacccaagtactgtggagtttgcatggacaataggtgctgcatcccctacaagtctaagactatcgacgtgtccttccagtgtcctgatgggcttggcttctcccgccaggtcctatggattaatgcctgcttctgtaacctgagctgtaggaatcccaatgacatctttgctgacttggaatcctaccctgacttctcagaaattgccaactaggcaggcacaaatcttgggtcttggggactaacccaatgcctgtgaagcagtcagcccttatggccaataacttttcaccaatgagccttagttaccctgatctggacccttggcctccatttctgtctctaaccattcaaatgacgcctgatggtgctgctcaggcccatgctatgagttttctccttgatatcattcagcatctactctaaagaaaaatgcctgtctctagctgttctggactacacccaagcctgatccagcctttccaagtcactagaagtcctgctggatcttgcctaaatcccaagaaatggaatcaggtagacttttaatatcactaatttcttctttagatgccaaaccacaagactctttgggtccattcagatgaatagatggaatttggaacaatagaataatctattatttggagcctgccaagaggtactgtaatgggtaattctgacgtcagcgcaccaaaactatcctgattccaaatatgtatgcacctcaaggtcatcaaacatttgccaagtgagttgaatagttgcttaattttgatttttaatggaaagttgtatccattaacctgggcattgttgaggttaagtttctcttcacccctacactgtgaagggtacagattaggtttgtcccagtcagaaataaaatttgataaacattcctgttgatgggaaaagcccccagttaatactccagagacagggaaaggtcagcccgtttcagaaggaccaattgactctcacactgaatcagctgctgactggcagggctttgggcagttggccaggctcttccttgaatcttctcccttgtcctgcttggggttcataggaattggtaaggcctctggactggcctgtctggcccctgagagtggtgccctggaacactcctctactcttacagagccttgagagacccagctgcagaccatgccagacccactgaaatgaccaagacaggttcaggtaggggtgtgggtcaaaccaagaagtgggtgcccttggtagcagcctggggtgacctctagagctggaggctgtgggactccaggggcccccgtgttcaggacacatctattgcagagactcatttcacagcctttcgttctgctgaccaaatggccagttttctggtaggaagatggaggtttaccggttgtttagaaacagaaatagacttaataaaggtttaaagctgaagaggttgaagctaaaaggaaaaggttgttgttaatgaatatcaggctattatttattgtattaggaaaatataatatttactgttagaattcttttatttagggccttttctgtgccagacattgctctcagtgctttgcatgtattagctcactgaatcttcacgacaatgttgagaagttcccattattatttctgttcttacaaatgtgaaacggaagctcatagaggtgagaaaactcaaccagagtcacccagttggtgactgggaaagttaggattcagatcgaaattggactgtctttataacccatattttccccctgtttttagagcttccaaatgtgtcagaataggaaaacattgcaataaatggcttgattttttaaaaaaaaaaaaaaaaaaaaaaa

SEQ ID NO: 358 - DNA, 1433 bp, Homo sapiens
tgtgtgtgtgtgtgtgtgagcgcgcgcgcgcgcgcgcgtgtgtactcgtgcgtgtgcctgtgtgtgcctgggagtgacctcacagctgccggaacataaagactcacaggtccgcctcccaggctcaaagctggctctgcaggggacatgagaggcacaccgaagacccacctcctggccttctccctcctctgcctcctctcaaaggtgcgtacccagctgtgcccgacaccatgtacctgcccctggccacctccccgatgcccgctgggagtacccctggtgctggatggctgtggctgctgccgggtatgtgcacggcggctgggggagccctgcgaccaactccacgtctgcgacgccagccagggcctggtctgccagcccggggcaggacccggtggccggggggccctgtgcctcttggcagaggacgacagcagctgtgaggtgaacggccgcctgtatcgggaaggggagaccttccagccccactgcagcatccgctgccgctgcgaggacggcggcttcacctgcgtgccgctgtgcagcgaggatgtgcggctgcccagctgggactgcccccaccccaggagggtcgaggtcctgggcaagtgctgccctgagtgggtgtgcggccaaggagggggactggggacccagccccttccagcccaaggaccccagttttctggccttgtctcttccctgccccctggtgtcccctgcccagaatggagcacggcctggggaccctgctcgaccacctgtgggctgggcatggccacccgggtgtccaaccagaaccgcttctgccgactggagacccagcgccgcctgtgcctgtccaggccctgcccaccctccaggggtcgcagtccacaaaacagtgccttctagagccgggctgggaatggggacacggtgtccaccatccccagctggtggccctgtgcctgggccctgggctgatggaagatggtccgtgcccaggcccttggctgcaggcaacactttagcttgggtccaccatgcagaacaccaatattaacacgctgcctggtctgtctggatcccgaggtatggcagaggtgcaagacctagtcccctttcctctaactcactgcctaggaggctggccaaggtgtccagggtcctctagcccactccctgcctacacacacagcctatatcaaacatgcacacgggcgagctttctctccgacttcccctgggcaagagatgggacaagcagtcccttaatattgaggctgcagcaggtgctgggctggactggccatttttctgggggtaggatgaagagaaggcacacagagattctggatctcctgctgccttttctggagtttgtaaaattgttcctgaatacaagcctatgcgtgaaaaaaaaaaaaaaaaaaaaaaaaaaaaaa

SEQ ID NO: 359 - DNA, 2368 bp, Homo sapiens
gcggtgccgcccgccgtggccgcctcagcccaccagccgggaccgcgagccatgctgtccgccgcccgcccccagggttgttaaagccagactgcgaactctcgccactgccgccaccgccgcgtcccgtcccaccgtcgcgggcaacaaccaaagtcgccgcaactgcagcacagagcgggcaaagccaggcaggccatggggctctgggcgctgttgcctggctgggtttctgctacgctgctgctggcgctggccgctctgcccgcagccctggctgccaacagcagtggccgatggtggggtattgtgaacgtagcctcctccacgaacctgcttacagactccaagagtctgcaactggtactcgagcccagtctgcagctgttgagccgcaaacagcggcgtctgatacgccaaaatccggggatcctgcacagcgtgagtggggggctgcagagtgccgtgcgcgagtgcaagtggcagttccggaatcgccgctggaactgtcccactgctccagggccccacctcttcggcaagatcgtcaaccgaggctgtcgagaaacggcgtttatcttcgctatcacctccgccggggtcacccattcggtggcgcgctcctgctcagaaggttccatcgaatcctgcacgtgtgactaccggcggcgcggccccgggggccccgactggcactgggggggctgcagcgacaacattgacttcggccgcctcttcggccgggagttcgtggactccggggagaaggggcgggacctgcgcttcctcatgaaccttcacaacaacgaggcaggccgtacgaccgtattctccgagatgcgccaggagtgcaagtgccacgggatgtccggctcatgcacggtgcgcacgtgctggatgcggctgcccacgctgcgcgccgtgggcgatgtgctgcgcgaccgcttcgacggcgcctcgcgcgtcctgtacggcaaccgcggcagcaaccgcgcttcgcgagcggagctgctgcgcctggagccggaagacccggcccacaaaccgccctccccccacgacctcgtctacttcgagaaatcgcccaacttctgcacgtacagcggacgcctgggcacagcaggcacggcagggcgcgcctgtaacagctcgtcgcccgcgctggacggctgcgagctgctctgctgcggcaggggccaccgcacgcgcacgcagcgcgtcaccgagcgctgcaactgcaccttccactggtgctgccacgtcagctgccgcaactgcacgcacacgcgcgtactgcacgagtgtctgtgaggcgctgcgcggactcgcccccaggaaacgctctcctcgagccctcccccaaacagactcgctagcactcaagacccggttattcgcccacccgagtacctccagtcacactccccgcggttcatacgcatcccatctctcccacttcctcctacctggggactcctcaaaccacttgcctggggcggcatgaaccctcttgccatcctgatggacctgccccggacctacctccctccctctccgcgggagaccccttgttgcactgccccctgcttggccaggaggtgagagaaggatgggtcccctccgccatggggtcggctcctgatggtgtcattctgcctgctccatcgcgccagcgacctctctgcctctcttcttcccctttgtcctgcgttttctccgggtcctcctaagtcccttcctattctcctgccatgggtgcagaccctgaacccacacctgggcatcagggcctttctcctccccacctgtagctgaagcaggaggttacagggcaaaagggcagctgtgatgatgtggaaatgaggttgggggaaccagcagaaatgcccccattctcccagtctctgtcgtggagccattgaacagctgtgagccatgcctccctgggccacctcctaccccttcctgtcctgcctcctcatcagtgtgtaaataatttgcactgaaacgtggatacagagccacgagtttggatgttgtaaataaaactatttattgtgctgggtcccagcctggtttgcaaagaccacctccaacccaacccaatccctctccactcttctctcctttctccctgcagccttttctggtccctcttctctcctcagtttctcaaagatgcgtttgcctcctggaatcagtatttccttccactgtagctattagcggctcctcgcccccaccagtgtagcatcttcctctgcagaataaaatctctatttttatcgatgacttggtggcttttccttgaatccagaacacaaccttgtttgtggtgtcccctatcctccccttttaccactcccag

SEQ ID NO: 360 - DNA, 2375 bp, Homo sapiens
acagtcacttactctacaggcagtggggcccgacacagacagcgccgcccccgccagccagcctcgcacgccctcggaagcgcaggctcccggcgctgcgctggagggttccccggcaccccagcctcccgtccccagcccgctgcacctccgggccccccttacccttgagaggcaccgggagttgtcgcgggggggcctcgggaaattccccggacccctgtgccaggaggtgcccggttcgcccgctcttcaccccccgccccccccgagggcggtgcccgggggtgctgccccatggagcggggaggcgggcgccgtctgctccgggagccctgacccgagtcggagctgtgtgtcgcagccgccccgaccccccgccgatcatgcgccggcgcccctggctctccagtcccactgggctgtgagccccccactcccagcccgtcagggcctgcgcgccatgggcagcgcccaccctcgcccctggctgcggctccgaccccagccccagccgcggccagcgctctgggtgctcctgttcttcctactgctgctggctgctgccatgcccaggtcagcacccaatgacattctggacctccgcctccccccggagcccgtgctcaatgccaacacagtgtgcctaacattgccaggcctgagccggcggcagatggaggtgtgtgtgcgtcaccctgatgtggctgcctcagccatacagggcatccagatcgccatccacgaatgccaacaccaattcagggaccagcgctggaactgctcaagcctggagactcgcaacaagatcccctatgagagtcccatcttcagcagaggtttccgagagagcgcttttgcctacgccatcgcagcagctggcgtggtgcacgccgtgtccaatgcgtgtgccctgggcaaactgaaggcctgtggctgtgatgcgtcccggcgaggggacgaggaggccttccgtaggaagctgcaccgcttacaactggatgcactgcagcgtggtaagggcctgagccatggggtcccggaacacccagccctgcccacagccagcccaggcctgcaggactcctgggagtggggcggctgcagccccgacatgggcttcggggagcgcttttctaaggactttctggactcccgggagcctcacagagacatccacgcgagaatgaggcttcacaacaaccgagttgggaggcaggcagtgatggagaacatgcggcggaagtgcaagtgccacggcacgtcaggcagctgccagctcaagacgtgctggcaggtgacgcccgagttccgcaccgtgggggcgctgctgcgcagccgcttccaccgcgccacgctcatccggccgcacaaccgcaacggcggccagctggagccgggcccagcgggggcaccctcgccggctccgggcgctcccgggccgcgccgacgggccagccccgccgacctggtctacttcgaaaagtctcccgacttctgcgagcgcgagccgcgcctggactcggcgggcaccgtgggccgcctgtgcaacaagagcagcgccggctcggatggctgcggcagcatgtgctgcggccgcggccacaacatcctgcgccagacgcgcagcgagcgctgccactgccgcttccactggtgctgtttcgtggtctgcgaagagtgccgcatcaccgagtgggtcagcgtctgcaagtgagcggcccggggtcccctgggccctgatcgaggtcccctcctggagcctggccctctgaggcttacggtcttggcaaggcagcatcgccttggctcttgggaagaggagattggaccacatgatcttataggaacccctcagctctgaggtctgtgatcgccggacagtccaggcctgtctgaaccccaccactcacttctgtgggctctaggactgactgggttcttcctccctccccgaagcccagacagttcagttgggctgggggttgctccacaccctaaaacaagcctcagccaggcaacccgtcagtctgtctccatcctttcaccccttccctggagatgggaggtggggaatgaatggaagctgacgggcagagagaggaggattaaaaaaaagaaatagacataactgagctgaagtaattccataaagggcccagacagcctcctccaccattcccttcatcattcatttaacaaatatttattttgcactctctttgcggcactctgggggcggtggggtgcgtgggggtggcaatgcaaggcactgaggccacagatgtgagtaagcgagacacaacacttgtcctcttggaggttacattcttgctggggggaggcatgggcaataaacaagtaaatatacaaac

SEQ ID NO: 361 - DNA, 2288 bp, Homo sapiens
ggggctgcagctccgtcagcccggcagagccaccctgagctcggtgagagcaaagccagagcccccagtcctttgctcgccggcttgctatctctctcgatcactccctcccttcctccctcccttcctcccggcggccgcggcggcgctggggaagcggtgaagaggagtggcccggccctggaagaatgcggctctgacaaggggacagaacccagcgcagtctccccacggtttaagcagcactagtgaagcccaggcaacccaaccgtgcctgtctcggaccccgcacccaaaccactggaggtcctgatcgatctgcccaccggagcctccgggcttcgacatgctggaggagccccggccgcggcctccgccctcgggcctcgcgggtctcctgttcctggcgttgtgcagtcgggctctaagcaatgagattctgggcctgaagttgcctggcgagccgccgctgacggccaacaccgtgtgcttgacgctgtccggcctgagcaagcggcagctaggcctgtgcctgcgcaaccccgacgtgacggcgtccgcgcttcagggtctgcacatcgcggtccacgagtgtcagcaccagctgcgcgaccagcgctggaactgctccgcgcttgagggcggcggccgcctgccgcaccacagcgccatcctcaagcgcggtttccgagaaagtgctttttccttctccatgctggctgctggggtcatgcacgcagtagccacggcctgcagcctgggcaagctggtgagctgtggctgtggctggaagggcagtggtgagcaggatcggctgagggccaaactgctgcagctgcaggcactgtcccgaggcaagagtttcccccactctctgcccagccctggccctggctcaagccccagccctggcccccaggacacatgggaatggggtggctgtaaccatgacatggactttggagagaagttctctcgggatttcttggattccagggaagctccccgggacatccaggcacgaatgcgaatccacaacaacagggtggggcgccaggtggtaactgaaaacctgaagcggaaatgcaagtgtcatggcacatcaggcagctgccagttcaagacatgctggagggcggccccagagttccgggcagtgggggcggcgttgagggagcggctgggccgggccatcttcattgatacccacaaccgcaattctggagccttccagccccgtctgcgtccccgtcgcctctcaggagagctggtctactttgagaagtctcctgacttctgtgagcgagaccccactatgggctccccagggacaaggggccgggcctgcaacaagaccagccgcctgttggatggctgtggcagcctgtgctgtggccgtgggcacaacgtgctccggcagacacgagttgagcgctgccattgccgcttccactggtgctgctatgtgctgtgtgatgagtgcaaggttacagagtgggtgaatgtgtgtaagtgagggtcagccttaccttggggctggggaagaggactgtgtgagaggggcgccttttcagccctttgctctgatttccttccaaggtcactcttggtccctggaagcttaaagtatctacctggaaacagctttaggggtggtgggggtcaggtggactctgggatgtgtagccttctccccaacaattggagggtcttgaggggaagctgccacccctcttctgctccttagacacctgaatggactaagatgaaatgcactgtattgctcctcccacttctcaactccagagcccctttaaccctgattcatactccttttggctggggagtccctatagtttcaccactcctctcccttgagggataaccccaggcactgtttggagccataagatctgtatctagaaagagatcacccactcctatgtactatccccaaactcctttactgcagcctgggctccctcttgtgggataatgggagacagtggtagagaggtttttcttgggaaagagacagagtgctgaggggcactctcccctgaatcctcagagagttgtctgtccaggcccttagggaagttgtctccttccattcagatgttaatggggaccctccaaaggaaggggttttcccatgactcttggagcctctttttccttcttcagcaggaagggtgggaagggataatttatcatactgagacttgttcttggttcctgtttgaaactaaaataaattaagttactggaaaaaaaaaaaaaaaaaa

SEQ ID NO: 362 - DNA, 1927 bp, Homo sapiens
taacccgccgcctccgctctccccggctgcaggcggcgtgcaggaccagcggcggccgtgcaggcggaggacttcggcgcggctcctcctgggtgtgaccccgggcgcgcccgccgcgcgacgatgagggcgcggccgcaggtctgcgaggcgctgctcttcgccctggcgctccagaccggcgtgtgctatggcatcaagtggctggcgctgtccaagacaccatcggccctggcactgaaccagacgcaacactgcaagcagctggagggtctggtgtctgcacaggtgcagctgtgccgcagcaacctggagctcatgcacacggtggtgcacgccgcccgcgaggtcatgaaggcctgtcgccgggcctttgccgacatgcgctggaactgctcctccattgagctcgcccccaactatttgcttgacctggagagagggacccgggagtcggccttcgtgtatgcgctgtcggccgccgccatcagccacgccatcgcccgggcctgcacctccggcgacctgcccggctgctcctgcggccccgtcccaggtgagccacccgggcccgggaaccgctggggaggatgtgcggacaacctcagctacgggctcctcatgggggccaagttttccgatgctcctatgaaggtgaaaaaaacaggatcccaagccaataaactgatgcgtctacacaacagtgaagtggggagacaggctctgcgcgcctctctggaaatgaagtgtaagtgccatggggtgtctggctcctgctccatccgcacctgctggaaggggctgcaggagctgcaggatgtggctgctgacctcaagacccgatacctgtcggccaccaaggtagtgcaccgacccatgggcacccgcaagcacctggtgcccaaggacctggatatccggcctgtgaaggactcggaactcgtctatctgcagagctcacctgacttctgcatgaagaatgagaaggtgggctcccacgggacacaagacaggcagtgcaacaagacatccaacggaagcgacagctgcgaccttatgtgctgcgggcgtggctacaacccctacacagaccgcgtggtcgagcggtgccactgtaagtaccactggtgctgctacgtcacctgccgcaggtgtgagcgtaccgtggagcgctatgtctgcaagtgaggccctgccctccgccccacgcaggagcgaggactctgctcaaggaccctcagcaactggggccaggggcctggagacactccatggagctctgcttgtgaattccagatgccaggcatgggaggcggcttgtgctttgccttcacttggaagccaccaggaacagaaggtctggccaccctggaaggagggcaggacatcaaaggaaaccgacaagattaaaaataacttggcagcctgaggctctggagtgcccacaggctggtgtaaggagcggggcttgggatcggtgagactgatacagacttgacctttcagggccacagagaccagcctccgggaaggggtctgcccgccttcttcagaatgttctgcgggaccccctggcccaccctggggtctgagcctgctgggcccaccacatggaatcactagcttgggttgtaaatgttttcttttgttttttgctttttcttcctttgggatgtggaagctacagaaatatttataaaacatagctttttctttggggtggcacttctcaattcctctttatatattttatatatataaatatatatgtatatatataatgatctctattttaaaactagctttttaagcagctgtatgaaataaatgctgagtgagccccagcccgcccctgcagttcccggcctcgtcaagtgaactcggcagaccctggggctggcagagggagctctccagtttccaggca

SEQ ID NO: 363 - DNA, 2894 bp, Homo sapiens
agcctgcaaaaaccacagagggcaaagccagaaagatggaaaggcacccatgcagctcaccacttgcctcagggagaccctcttcacaggggcttctcaaaagacctccctatggtggttgggcattgcctccttcggggttccagagaagctgggctgcgccaatttgccgctgaacagccgccagaaggagctgtgcaagaggaaaccgtacctgctgccgagcatccgagagggcgcccggctgggcattcaggagtgcgggagccagttcagacacgagagatggaactgcatgatcaccgccgccgccactaccgccccgatgggcgccagccccctctttggctacgagctgagcagcggcaccaaagagacagcatttatttatgctgtgatggctgcaggcctggtgcattctgtgaccaggtcatgcagtgcaggcaacatgacagagtgttcctgtgacaccaccttgcagaacggcggctcagcaagtgaaggctggcactgggggggctgctccgatgatgtccagtatggcatgtggttcagcagaaagttcctagatttccccatcggaaacaccacgggcaaagaaaacaaagtactattagcaatgaacctacataacaatgaagctggaaggcaggctgtcgccaagttgatgtcagtagactgccgctgccacggagtttccggctcctgtgctgtgaaaacatgctggaaaaccatgtcttcttttgaaaagattggccatttgttgaaggataaatatgaaaacagtatccagatatcagacaaaacaaagaggaaaatgcgcaggagagaaaaagatcagaggaaaataccaatccataaggatgatctgctctatgttaataagtctcccaactactgtgtagaagataagaaactgggaatcccagggacacaaggcagagaatgcaaccgtacatcagagggtgcagatggctgcaacctcctctgctgtggccgaggttacaacacccatgtggtcaggcacgtggagaggtgtgagtgtaagttcatctggtgctgctatgtccgttgcaggaggtgtgaaagcatgactgatgtccacacttgcaagtaaccactccatccagccttgggcaagatgcctcagcaatatacaatggcattgcaaccagagaggtgcccatccctgtgcagcgctagtaaagttgactcttgcagtggaatccctagaaccttggacctgagagtttcccttacctgatcgacatattttcctttatctgatcaacccatcaatcatgtggatttcttgggattctaatgttgaaaaggtttatattcaccttttgatgatttggggaatatatattgacatacaaggaagataatctgtttcctaagcaagaaataacaggaaagatcccttatgccaggaggcctgccatactcaggataagatccttgaatatggaacttagttacaggactcaataatggtgggtgaacattagtcatttttaaaagacacctcttatagcaataaggagacattaacatgaatctcatttattctctcagtattttaactgaagaaattatactgtttgtgtgtggatagaagatgttgaaaagttaacataagcattgggtgctgacttaccctttcatgtacttccaaagaaaggtaatcaaaaagaatcttcttaagtgatataatatccctaaaaaaatgatcattacagatgtttagtgacaaagaatcaatatgtaaaaagtataatgaatgatttagattttaagtgccttttcactgggagaatctggaaaaacctccataaggtatatagcaatctttgatctttagattcatacttttatcacagatcagtttcaactgttaaaaacccacctctgagatactggggggaggatcctgaaacatgcgggaaaaggagaggtaaacagtggaggtaaaaatataatttcatacattgtaaagaaaagcaccctttaaatgtgtaaagacagtgttttgtaaagaattttgtttaaaaagtttctattttgtaaatacagtacttaagttatatgatttatattaaaacatttattgacaaagcctaagagctaaggcagtaaaattatctcataaataatattagcttattttttttcatactattaatgctatttttttggacatcgaagagaatttaacttagcagttagttatatggatgtgtatttcttgctaaaatgacagttttatatgttatagattaaaatatgttgcaaaatatcaaaaatttgtgttatttcagcagtaagattaattgaattctcttttcacattagttatgcttaactcataaggttattataataaattatattagtaaaagtcttaactggaaaaaagaatctaaatcagaatagtgatcaatttgtggatttgatatcctggatatttattatattttatgtaatgctgcatttctatttgaatgttaagtggtctttcttgtttttaatattcatgcatgtatattcatcatattttacaaggttcctggtaaaaattacagggctctatttaaggatgtattttaatgtaaatgcttatgttttttatgaattgttaaatatttcagtattatatagaaaaaaatagatttttaaaattcagaatggacaaagagaatattcattttcttattaataagataaagaaatgtttccctgccccacagtcttcattctatttctctttaattttattcactgaggcagagaaacaatttttgaaaaagagcaaacccatggaaaatgtctcagatctaatattaaaatcaagactaagcatttaactgtgaaaaaaaaaaaaaaaaaaa

SEQ ID NO: 364 - DNA, 2301 bp, Homo sapiens
agcagagcggacgggcgcgcgggaggcgcgcagagctttcgggctgcaggcgctcgctgccgctggggaattgggctgtgggcgaggcggtccgggctggcctttatcgctcgctgggcccatcgtttgaaactttatcagcgagtcgccactcgtcgcaggaccgagcggggggcgggggcgcggcgaggcggcggccgtgacgaggcgctcccggagctgagcgcttctgctctgggcacgcatggcgcccgcacacggagtctgacctgatgcagacgcaagggggttaatatgaacgcccctctcggtggaatctggctctggctccctctgctcttgacctggctcacccccgaggtcaactcttcatggtggtacatgagagctacaggtggctcctccagggtgatgtgcgataatgtgccaggcctggtgagcagccagcggcagctgtgtcaccgacatccagatgtgatgcgtgccattagccagggcgtggccgagtggacagcagaatgccagcaccagttccgccagcaccgctggaattgcaacaccctggacagggatcacagcctttttggcagggtcctactccgaagtagtcgggaatctgcctttgtttatgccatctcctcagctggagttgtatttgccatcaccagggcctgtagccaaggagaagtaaaatcctgttcctgtgatccaaagaagatgggaagcgccaaggacagcaaaggcatttttgattggggtggctgcagtgataacattgactatgggatcaaatttgcccgcgcatttgtggatgcaaaggaaaggaaaggaaaggatgccagagccctgatgaatcttcacaacaacagagctggcaggaaggctgtaaagcggttcttgaaacaagagtgcaagtgccacggggtgagcggctcatgtactctcaggacatgctggctggccatggccgacttcaggaaaacgggcgattatctctggaggaagtacaatggggccatccaggtggtcatgaaccaggatggcacaggtttcactgtggctaacgagaggtttaagaagccaacgaaaaatgacctcgtgtattttgagaattctccagactactgtatcagggaccgagaggcaggctccctgggtacagcaggccgtgtgtgcaacctgacttcccggggcatggacagctgtgaagtcatgtgctgtgggagaggctacgacacctcccatgtcacccggatgaccaagtgtgggtgtaagttccactggtgctgcgccgtgcgctgtcaggactgcctggaagctctggatgtgcacacatgcaaggcccccaagaacgctgactggacaaccgctacatgaccccagcaggcgtcaccatccaccttcccttctacaaggactccattggatctgcaagaacactggacctttgggttctttctggggggatatttcctaaggcatgtggcctttatctcaacggaagccccctcttcctccctgggggccccaggatggggggccacacgctgcacctaaagcctaccctattctatccatctcctggtgttctgcagtcatctcccctcctggcgagttctctttggaaatagcatgacaggctgttcagccgggagggtggtgggcccagaccactgtctccacccaccttgacgtttcttctttctagagcagttggccaagcagaaaaaaaagtgtctcaaaggagctttctcaatgtcttcccacaaatggtcccaattaagaaattccatacttctctcagatggaacagtaaagaaagcagaatcaactgcccctgacttaactttaacttttgaaaagaccaagacttttgtctgtacaagtggttttacagctaccacccttagggtaattggtaattacctggagaagaatggctttcaatacccttttaagtttaaaatgtgtatttttcaaggcatttattgccatattaaaatctgatgtaacaaggtggggacgtgtgtcctttggtactatggtgtgttgtatctttgtaagagcaaaagcctcagaaagggattgctttgcattactgtccccttgatataaaaaatctttagggaatgagagttccttctcacttagaatctgaagggaattaaaaagaagatgaatggtctggcaatattctgtaactattgggtgaatatggtggaaaataatttagtggatggaatatcagaagtatatctgtacagatcaagaaaaaaaggaagaataaaattcctatatcat

SEQ ID NO: 365 - DNA, 2014 bp, Homo sapiens
aaaccctgaagagcccaagcaatgtggttgtaaaatttgcaaaataagattaaatcttaactgcaatctgttaacactgctgtctcctttcactctttctcctatatcacactttcccacatgttggatggccttggagtggtagccataagcatttttggaattcaactaaaaactgaaggatccttgaggacggcagtacctggcatacctacacagtcagcgttcaacaagtgtttgcaaaggtacattggggcactgggggcacgagtgatctgtgacaatatccctggtttggtgagccggcagcggcagctgtgccagcgttacccagacatcatgcgttcagtgggcgagggtgcccgagaatggatccgagagtgtcagcaccaattccgccaccaccgctggaactgtaccaccctggaccgggaccacaccgtctttggccgtgtcatgctcagaagtagccgagaggcagcttttgtatatgccatctcatcagcaggggtagtccacgctattactcgcgcctgtagccagggtgaactgagtgtgtgcagctgtgacccctacacccgtggccgacaccatgaccagcgtggggactttgactggggtggctgcagtgacaacatccactacggtgtccgttttgccaaggccttcgtggatgccaaggagaagaggcttaaggatgcccgggccctcatgaacttacataataaccgctgtggtcgcacggctgtgcggcggtttctgaagctggagtgtaagtgccatggcgtgagtggttcctgtactctgcgcacctgctggcgtgcactctcagatttccgccgcacaggtgattacctgcggcgacgctatgatggggctgtgcaggtgatggccacccaagatggtgccaacttcaccgcagcccgccaaggctatcgccgtgccacccggactgatcttgtctactttgacaactctccagattactgtgtcttggacaaggctgcaggttccctaggcactgcaggccgtgtctgcagcaagacatcaaaaggaacagacggttgtgaaatcatgtgctgtggccgagggtacgacacaactcgagtcacccgtgttacccagtgtgagtgcaaattccactggtgctgtgctgtacggtgcaaggaatgcagaaatactgtggacgtccatacttgcaaagcccccaagaaggcagagtggctggaccagacctgaacacacagatacctcactcatccctccaattcaagcctctcaactcaaaagcacaagatccttgcatgcacaccttcctccaccctccaccctgggctgctaccgcttctatttaaggatgtagagagtaatccatagggaccatggtgtcctggctggttccttagccctgggaaggagttgtcaggggatataagaaactgtgcaagctccctgatttcccgctctggagatttgaagggagagtagaagagatagggggtctttagagtgaaatgagttgcactaaagtacgtagttgaggctccttttttctttcctttgcaccagcttcccgacacttcttggtgtgcaagaggaagggtacctgtagagagcttctttttgtttctacctggccaaagttagatgggacaaagatgaatggcatgtcccttctctgaagtccgtttgagcagaactacctggtaccccgaaagaaaaatcttaggctaccacattctattattgagagcctgagatgttagccatagtggacaaggttccattcacatgctcatatgtttataaactgtgttttgtagaagaaaaagaatcataacaatacaaacacacattcattctctctttttctctctaccattctcaacctgtattggacagcactgcctcttttgcttacttgctgcctgttcaaactgaggtggaatgcagtggttcccatgcttaacagatcattaaaacaccctagaacactcctaggatagattaatgt

SEQ ID NO: 366 - DNA, 1506 bp, Homo sapiens
gcgcttctgacaagcccgaaagtcatttccaatctcaagtggactttgttccaactattgggggcgtcgctccccctcttcatggtcgcgggcaaacttcctcctcggcgcctcttctaatggagccccacctgctcgggctgctcctcggcctcctgctcggtggcaccagggtcctcgctggctacccaatttggtggtccctggccctgggccagcagtacacatctctgggctcacagcccctgctctgcggctccatcccaggcctggtccccaagcaactgcgcttctgccgcaattacatcgagatcatgcccagcgtggccgagggcgtgaagctgggcatccaggagtgccagcaccagttccggggccgccgctggaactgcaccaccatagatgacagcctggccatctttgggcccgtcctcgacaaagccacccgcgagtcggccttcgttcacgccatcgcctcggccggcgtggccttcgccgtcacccgctcctgcgccgagggcacctccaccatttgcggctgtgactcgcatcataaggggccgcctggcgaaggctggaagtggggcggctgcagcgaggacgctgacttcggcgtgttagtgtccagggagttcgcggatgcgcgcgagaacaggccggacgcgcgctcggccatgaacaagcacaacaacgaggcgggccgcacgactatcctggaccacatgcacctcaaatgcaagtgccacgggctgtcgggcagctgtgaggtgaagacctgctggtgggcgcagcctgacttccgtgccatcggtgacttcctcaaggacaagtatgacagcgcctcggagatggtagtagagaagcaccgtgagtcccgaggctgggtggagaccctccgggccaagtactcgctcttcaagccacccacggagagggacctggtctactacgagaactcccccaacttttgtgagcccaacccagagacgggttcctttggcacaagggaccggacttgcaatgtcacctcccacggcatcgatggctgcgatctgctctgctgtggccggggccacaacacgaggacggagaagcggaaggaaaaatgccactgcatcttccactggtgctgctacgtcagctgccaggagtgtattcgcatctacgacgtgcacacctgcaagtagggcaccagggcgctgggaaggggtgaagtgtgtggctgggcggattcagcgaagtctcatgggaagcaggacctagagccgggcacagccctcagcgtcagacagcaaggaactgtcaccagccgcacgcgtggtaaatgacccagacccaactcgcctgtggacggggaggctctccctctctctcatcttacatttctcaccctactctggatggtgtgtggtttttaaagaagggggctttctttttagttctctagggtctgataggaacagacctgaggcttatctttgcacatgttaaagaaaaaaaaaaaaa

SEQ ID NO: 367 - DNA, 2932 bp, Homo sapiens
agctcccagggcccggccccccccggcgctcacgctctcggggcggactcccggccctccgcgccctctcgcgcggcgatggccccactcggatacttcttactcctctgcagcctgaagcaggctctgggcagctacccgatctggtggtcgctggctgttgggccacagtattcctccctgggctcgcagcccatcctgtgtgccagcatcccgggcctggtccccaagcagctccgcttctgcaggaactacgtggagatcatgcccagcgtggccgagggcatcaagattggcatccaggagtgccagcaccagttccgcggccgccggtggaactgcaccaccgtccacgacagcctggccatcttcgggcccgtgctggacaaagctaccagggagtcggcctttgtccacgccattgcctcagccggtgtggcctttgcagtgacacgctcatgtgcagaaggcacggccgccatctgtggctgcagcagccgccaccagggctcaccaggcaagggctggaagtggggtggctgtagcgaggacatcgagtttggtgggatggtgtctcgggagttcgccgacgcccgggagaaccggccagatgcccgctcagccatgaaccgccacaacaacgaggctgggcgccaggccatcgccagccacatgcacctcaagtgcaagtgccacgggctgtcgggcagctgcgaggtgaagacatgctggtggtcgcaacccgacttccgcgccatcggtgacttcctcaaggacaagtacgacagcgcctcggagatggtggtggagaagcaccgggagtcccgcggctgggtggagaccctgcggccgcgctacacctacttcaaggtgcccacggagcgcgacctggtctactacgaggcctcgcccaacttctgcgagcccaaccctgagacgggctccttcggcacgcgcgaccgcacctgcaacgtcagctcgcacggcatcgacggctgcgacctgctgtgctgcggccgcggccacaacgcgcgagcggagcggcgccgggagaagtgccgctgcgtgttccactggtgctgctacgtcagctgccaggagtgcacgcgcgtctacgacgtgcacacctgcaagtaggcaccggccgcggctccccctggacggggcgggccctgcctgagggtgggcttttccctgggtggagcaggactcccacctaaacggggcagtactcctccctgggggcgggactcctccctgggggtggggctcctacctgggggcagaactcctacctgaaggcagggctcctccctggagctagtgtctcctctctggtggctgggctgctcctgaatgaggcggagctccaggatggggaggggctctgcgttggcttctccctggggacggggctcccctggacagaggcggggctacagattgggcggggcttctcttgggtgggacagggcttctcctgcgggggcgaggcccctcccagtaagggcgtggctctgggtgggcggggcactaggtaggcttctacctgcaggcggggctcctcctgaaggaggcggggctctaggatggggcacggctctggggtaggctgctccctgagggcggagcgcctccttaggagtggggttttatggtggatgaggcttcttcctggatggggcagagcttctcctgaccagggcaaggccccttccacgggggctgtggctctgggtgggcgtggcctgcataggctccttcctgtgggtggggcttctctgggaccaggctccaatggggcggggcttctctccgcgggtgggactcttccctgggaaccgccctcctgattaaggcgtggcttctgcaggaatcccggctccagagcaggaaattcagcccaccagccacctcatccccaaccccctgtaaggttccatccacccctgcgtcgagctgggaaggttccatgaagcgagtcgggtccccaacccgtgcccctgggatccgagggcccctctccaagcgcctggctttggaatgctccaggcgcgccgacgcctgtgccaccccttcctcagcctggggtttgaccacccacctgaccaggggccctacctggggaaagcctgaagggcctcccagcccccaaccccaagaccaagcttagtcctgggagaggacagggacttcgcagaggcaagcgaccgaggccctcccaaagaggcccgccctgcccgggctcccacaccgtcaggtactcctgccagggaactggcctgctgcgccccaggccccgcccgtctctgctctgctcagctgcgcccccttctttgcagctgcccagcccctcctccctgccctcgggtctccccacctgcactccatccagctacaggagagatagaagcctctcgtcccgtccctccctttcctccgcctgtccacagccccttaagggaaaggtaggaagagaggtccagccccccaggctgcccagagctgctggtctcatttgggggcgttcgggaggtttggggggcatcaaccccccgactgtgctgctcgcgaaggtcccacagccctgagatgggccggcccccttcctggcccctcatggcgggactggagaaatggtccgctttcctggagccaatggcccggcccctcctgactcatccgcctggcccgggaatgaatggggaggccgctgaacccacccggcccatatccctggttgcctcatggccagcgcccctcagcctctgccactgtgaaccggctcccaccctcaaggtgcggggagaagaagcggccaggcggggcgccccaagagcccaaaagagggcacaccgccatcctctgcctcaaattctgcgtttttggttttaatgttatatctgatgctgctatatccactgtccaacgg

SEQ ID NO: 368 - DNA, 1595 bp, Homo sapiens
ggctctggggcggcgctgacagtctggtccgcgccgggcagcgggcgcagcagcgggcaggctgccggcaggcacacggaggcagagccccgccgcgcgcgccccggcccgcccgcgggcgcccacctgcagccccgacgggaggccccccgcggccgcagccgctgccccgggccgggcgcccgcggcggcaccatgagtccccgctcgtgcctgcgttcgctgcgcctcctcgtcttcgccgtcttctcagccgccgcgagcaactggctgtacctggccaagctgtcgtcggtggggagcatctcagaggaggagacgtgcgagaaactcaagggcctgatccagaggcaggtgcagatgtgcaagcggaacctggaagtcatggactcggtgcgccgcggtgcccagctggccattgaggagtgccagtaccagttccggaaccggcgctggaactgctccacactcgactccttgcccgtcttcggcaaggtggtgacgcaagggactcgggaggcggccttcgtgtacgccatctcttcggcaggtgtggcctttgcagtgacgcgggcgtgcagcagtggggagctggagaagtgcggctgtgacaggacagtgcatggggtcagcccacagggcttccagtggtcaggatgctctgacaacatcgcctacggtgtggccttctcacagtcgtttgtggatgtgcgggagagaagcaagggggcctcgtccagcagagccctcatgaacctccacaacaatgaggccggcaggaaggccatcctgacacacatgcgggtggaatgcaagtgccacggggtgtcaggctcctgtgaggtaaagacgtgctggcgagccgtgccgcccttccgccaggtgggtcacgcactgaaggagaagtttgatggtgccactgaggtggagccacgccgcgtgggctcctccagggcactggtgccacgcaacgcacagttcaagccgcacacagatgaggacctggtgtacttggagcctagccccgacttctgtgagcaggacatgcgcagcggcgtgctgggcacgaggggccgcacatgcaacaagacgtccaaggccatcgacggctgtgagctgctgtgctgtggccgcggcttccacacggcgcaggtggagctggctgaacgctgcagctgcaaattccactggtgctgcttcgtcaagtgccggcagtgccagcggctcgtggagttgcacacgtgccgatgaccgcctgcctagccctgcgccggcaaccacctagtggcccagggaaggccgataatttaaacagtctcccaccacctaccccaagagatactggttgtattttttgttctggtttggtttttgggtcctcatgttatttattgccgaaaccaggcaggcaaccccaagggcaccaaccagggcctccccaaagcctgggcctttgtggctgccactgaccaaagggaccttgctcgtgccgctggctgcccgcatgtggctgccactgaccactcagttgttatctgtgtccgtttttctacttgcagacctaaggtggagtaacaaggagtattaccaccaca

SEQ ID NO: 369 - DNA, 5855 bp, Homo sapiens
agttgcctgcgcgccctcgccggaccggcggctccctagttgcgccccgaccaggccctgcccttgctgccggctcgcgcgcgtccgcgccccctccattcctgggcgcatcccagctctgccccaactcgggagtccaggcccgggcgccagtgcccgcttcagctccggttcactgcgcccgccggacgcgcgccggaggactccgcagccctgctcctgaccgtccccccaggcttaacccggtcgctccgctcggattcctcggctgcgctcgctcgggtggcgacttcctccccgcgccccctccccctcgccatgaagaagtccattggaatattaagcccaggagttgctttggggatggctggaagtgcaatgtcttccaagttcttcctagtggctttggccatatttttctccttcgcccaggttgtaattgaagccaattcttggtggtcgctaggtatgaataaccctgttcagatgtcagaagtatatattataggagcacagcctctctgcagccaactggcaggactttctcaaggacagaagaaactgtgccacttgtatcaggaccacatgcagtacatcggagaaggcgcgaagacaggcatcaaagaatgccagtatcaattccgacatcgaaggtggaactgcagcactgtggataacacctctgtttttggcagggtgatgcagataggcagccgcgagacggccttcacatacgcggtgagcgcagcaggggtggtgaacgccatgagccgggcgtgccgcgagggcgagctgtccacctgcggctgcagccgcgccgcgcgccccaaggacctgccgcgggactggctctggggcggctgcggcgacaacatcgactatggctaccgctttgccaaggagttcgtggacgcccgcgagcgggagcgcatccacgccaagggctcctacgagagtgctcgcatcctcatgaacctgcacaacaacgaggccggccgcaggacggtgtacaacctggctgatgtggcctgcaagtgccatggggtgtccggctcatgtagcctgaagacatgctggctgcagctggcagacttccgcaaggtgggtgatgccctgaaggagaagtacgacagcgcggcggccatgcggctcaacagccggggcaagttggtacaggtcaacagccgcttcaactcgcccaccacacaagacctggtctacatcgaccccagccctgactactgcgtgcgcaatgagagcaccggctcgctgggcacgcagggccgcctgtgcaacaagacgtcggagggcatggatggctgcgagctcatgtgctgcggccgtggctacgaccagttcaagaccgtgcagacggagcgctgccactgcaagttccactggtgctgctacgtcaagtgcaagaagtgcacggagatcgtggaccagtttgtgtgcaagtagtgggtgccacccagcactcagccccgctcccaggacccgcttatttatagaaagtacagtgattctggtttttggtttttagaaatattttttatttttccccaagaattgcaaccggaaccattttttttcctgttaccatctaagaactctgtggtttattattaatattataattattatttggcaataatgggggtgggaaccaagaaaaatatttattttgtggatctttgaaaaggtaatacaagacttcttttgatagtatagaatgaaggggaaataacacataccctaacttagctgtgtggacatggtacacatccagaaggtaaagaaatacattttctttttctcaaatatgccatcatatgggatgggtaggttccagttgaaagagggtggtagaaatctattcacaattcagcttctatgaccaaaatgagttgtaaattctctggtgcaagataaaaggtcttgggaaaacaaaacaaaacaaaacaaacctcccttccccagcagggctgctagcttgctttctgcattttcaaaatgataatttacaatggaaggacaagaatgtcatattctcaaggaaaaaaggtatatcacatgtctcattctcctcaaatattccatttgcagacagaccgtcatattctaatagctcatgaaatttgggcagcagggaggaaagtccccagaaattaaaaaatttaaaactcttatgtcaagatgttgatttgaagctgttataagaattaggattccagattgtaaaaagatccccaaatgattctggacactagatttttttgtttggggaggttggcttgaacataaatgaaaatatcctgttattttcttagggatacttggttagtaaattataatagtaaaaataatacatgaatcccattcacaggttctcagcccaagcaacaaggtaattgcgtgccattcagcactgcaccagagcagacaacctatttgaggaaaaacagtgaaatccaccttcctcttcacactgagccctctctgattcctccgtgttgtgatgtgatgctggccacgtttccaaacggcagctccactgggtcccctttggttgtaggacaggaaatgaaacattaggagctctgcttggaaaacagttcactacttagggatttttgtttcctaaaacttttattttgaggagcagtagttttctatgttttaatgacagaacttggctaatggaattcacagaggtgttgcagcgtatcactgttatgatcctgtgtttagattatccactcatgcttctcctattgtactgcaggtgtaccttaaaactgttcccagtgtacttgaacagttgcatttataaggggggaaatgtggtttaatggtgcctgatatctcaaagtcttttgtacataacatatatatatatatacatatatataaatataaatataaatatatctcattgcagccagtgatttagatttacagtttactctggggttatttctctgtctagagcattgttgtccttcactgcagtccagttgggattattccaaaagttttttgagtcttgagcttgggctgtggccctgctgtgatcataccttgagcacgacgaagcaaccttgtttctgaggaagcttgagttctgactcactgaaatgcgtgttgggttgaagatatcttttttcttttctgcctcacccctttgtctccaacctccatttctgttcactttgtggagagggcattacttgttcgttatagacatggacgttaagagatattcaaaactcagaagcatcagcaatgtttctcttttcttagttcattctgcagaatggaaacccatgcctattagaaatgacagtacttattaattgagtccctaaggaatattcagcccactacatagatagcttttttttttttttttttaataaggacacctctttccaaacagtgccatcaaatatgttcttatctcagacttacgttgttttaaaagtttggaaagatacacatctttcataccccccttaggcaggttggctttcatatcacctcagccaactgtggctcttaatttattgcataatgatattcacatcccctcagttgcagtgaattgtgagcaaaagatcttgaaagcaaaaagcactaattagtttaaaatgtcacttttttggtttttattatacaaaaaccatgaagtactttttttatttgctaaatcagattgttcctttttagtgactcatgtttatgaagagagttgagtttaacaatcctagcttttaaaagaaactatttaatgtaaaatattctacatgtcattcagatattatgtatatcttctagcctttattctgtacttttaatgtacatatttctgtcttgcgtgatttgtatatttcactggtttaaaaaacaaacatcgaaaggcttatgccaaatggaagatagaatataaaataaaacgttacttgtatattggtaagtggtttcaattgtccttcagataattcatgtggagatttttggagaaaccatgacggatagtttaggatgactacatgtcaaagtaataaaagagtggtgaattttaccaaaaccaagctatttggaagcttcaaaaggtttctatatgtaatggaacaaaaggggaattctcttttcctatatatgttccttacaaaaaaaaaaaaaaaagaaatcaagcagatggcttaaagctggttataggattgctcacattcttttagcattatgcatgtaacttaattgttttagagcgtgttgctgttgtaacatcccagagaagaatgaaaaggcacatgcttttatccgtgaccagatttttagtccaaaaaaatgtatttttttgtgtgtttaccactgcaactattgcacctctctatttgaatttactgtggaccatgtgtggtgtctctatgccctttgaaagcagtttttataaaaagaaagcccgggtctgcagagaatgaaaactggttggaaactaaaggttcattgtgttaagtgcaattaatacaagttattgtgcttttcaaaaatgtacacggaaatctggacagtgctgcacagattgatacattagcctttgctttttctctttccggataaccttgtaacatattgaaaccttttaaggatgccaagaatgcattattccacaaaaaaacagcagaccaacatatagagtgtttaaaatagcatttctgggcaaattcaaactcttgtggttctaggactcacatctgtttcagtttttcctcagttgtatattgaccagtgttctttattgcaaaaacatatacccgatttagcagtgtcagcgtattttttcttctcatcctggagcgtattcaagatcttcccaatacaagaaaattaataaaaaatttatatataggcagcagcaaaagagccatgttcaaaatagtcattatgggctcaaatagaaagaagacttttaagttttaatccagtttatctgttgagttctgtgagctactgacctcctgagactggcactgtgtaagttttagttgcctaccctagctcttttctcgtacaattttgccaataccaagtttcaatttgtttttacaaaacattattcaagccactagaattatcaaatatgacgctatagcagagtaaatactctgaataagagaccggtactagctaactccaagagatcgttagcagcatcagtccacaaacacttagtggcccacaatatatagagagatagaaaaggtagttataacttgaagcatgtatttaatgcaaataggcacgaaggcacaggtctaaaatactacattgtcactgtaagctatacttttaaaatatttattttttttaaagtattttctagtcttttctctctctgtggaatggtgaaagagagatgccgtgttttgaaagtaagatgatgaaatgaatttttaattcaagaaacattcagaaacataggaattaaaacttagagaaatgatctaatttccctgttcacacaaactttacactttaatctgatgattggatattttattttagtgaaacatcatcttgttagctaactttaaaaaatggatgtagaatgattaaaggttggtatgatttttttttaatgtatcagtttgaacctagaatattgaattaaaatgctgtctcagtattttaaaagcaaaaaaggaatggaggaaaattgcatcttagaccatttttatatgcagtgtacaatttgctgggctagaaatgagataaagattatttatttttgttcatatcttgtacttttctattaaaatcattttatgaaatccaaaaaaaaaaaaaaaaaa

SEQ ID NO: 370 - DNA, 2184 bp, Homo sapiens
tattcttccaaatggaaactgctaatttttgaagcagaaggttgacagcttcagtaagatctcaagagagcgagaagactggaatcagggaaccctactctggaaactgtcagtcccagggcactggggagggctgaggccgaccatgcccagcctgctgctgctgttcacggctgctctgctgtccagctgggctcagcttctgacagacgccaactcctggtggtcattagctttgaacccggtgcagagacccgagatgtttatcatcggtgcccagcccgtgtgcagtcagcttcccgggctctcccctggccagaggaagctgtgccaattgtaccaggagcacatggcctacataggggagggagccaagactggcatcaaggaatgccagcaccagttccggcagcggcggtggaattgcagcacagcggacaacgcatctgtctttgggagagtcatgcagataggcagccgagagaccgccttcacccacgcggtgagcgccgcgggcgtggtcaacgccatcagccgggcctgccgcgagggcgagctctccacctgcggctgcagccggacggcgcggcccaaggacctgccccgggactggctgtggggcggctgtggggacaacgtggagtacggctaccgcttcgccaaggagtttgtggatgcccgggagcgagagaagaactttgccaaaggatcagaggagcagggccgggtgctcatgaacctgcaaaacaacgaggccggtcgcagggctgtgtataagatggcagacgtagcctgcaaatgccacggcgtctcggggtcctgcagcctcaagacctgctggctgcagctggccgagttccgcaaggtcggggaccggctgaaggagaagtacgacagcgcggccgccatgcgcgtcacccgcaagggccggctggagctggtcaacagccgcttcacccagcccaccccggaggacctggtctatgtggaccccagccccgactactgcctgcgcaacgagagcacgggctccctgggcacgcagggccgcctctgcaacaagacctcggagggcatggatggctgtgagctcatgtgctgcgggcgtggctacaaccagttcaagagcgtgcaggtggagcgctgccactgcaagttccactggtgctgcttcgtcaggtgtaagaagtgcacggagatcgtggaccagtacatctgtaaatagcccggagggcctgctcccggcccccctgcactctgcctcacaaaggtctatattatataaatctatataaatctattttatatttgtataagtaaatgggtgggtgctatacaatggaaagatgaaaatggaaaggaagagcttatttaagagacgctggagatctctgaggagtggactttgctggttctctcctcttggtgggtgggagacagggctttttctctccctctggcgaggactctcaggatgtagggacttggaaatatttactgtctgtccaccacggcctggaggagggaggttgtggttggatggaggagatgatcttgtctggaagtctagagtctttgttggttagaggactgcctgtgatcctggccactaggccaagaggccctatgaaggtggcgggaactcagcttcaacctcgatgtcttcagggtcttgtccagaatgtagatgggttccgtaagaggcctggtgctctcttactctttcatccacgtgcacttgtgcggcatctgcagtttacaggaacggctccttccctaaaatgagaagtccaaggtcatctctggcccagtgaccacagagagatctgcacctcccggacttcaggcctgcctttccagcgagaattcttcatcctccacggttcactagctcctacctgaagaggaaagggggccatttgacctgacatgtcaggaaagccctaaactgaatgtttgcgcctgggctgcagaagccagggtgcatgaccaggctgcgtggacgttatactgtcttcccccacccccggggaggggaagcttgagctgctgctgtcactcctccaccgagggaggcctcacaaaccacaggacgctgcaacgggtcaggctggcgggcccggcgtgctcatcatctctgccccaggtgtacggtttctctctgacattaaatgcccttcatgg

SEQ ID NO: 371 - DNA, 1700 bp, Homo sapiens
cgcaggagacacaggcgctggctgccccgtccgctctccgcctccgccgcgccctcctcgcccgggatgggcccccccgccgccgccggatccctcgcctcccggccgccgccgttgcgctcgccgcgctcgcactgaagcccgggccctcgcgcgccgcggttcgccccgcagcctcgccccctgcccacccgggcggccgtagggcggtcacgatgctgccgcccttaccctcccgcctcgggctgctgctgctgctgctcctgtgcccggcgcacgtcggcggactgtggtgggctgtgggcagccccttggttatggaccctaccagcatctgcaggaaggcacggcggctggccgggcggcaggccgagttgtgccaggctgagccggaagtggtggcagagctagctcggggcgcccggctcggggtgcgagagtgccagttccagttccgcttccgccgctggaattgctccagccacagcaaggcctttggacgcatcctgcaacaggacattcgggagacggccttcgtgttcgccatcactgcggccggcgccagccacgccgtcacgcaggcctgttctatgggcgagctgctgcagtgcggctgccaggcgccccgcgggcgggcccctccccggccctccggcctgcccggcacccccggaccccctggccccgcgggctccccggaaggcagcgccgcctgggagtggggaggctgcggcgacgacgtggacttcggggacgagaagtcgaggctctttatggacgcgcggcacaagcggggacgcggagacatccgcgcgttggtgcaactgcacaacaacgaggcgggcaggctggccgtgcggagccacacgcgcaccgagtgcaaatgccacgggctgtcgggatcatgcgcgctgcgcacctgctggcagaagctgcctccatttcgcgaggtgggcgcgcggctgctggagcgcttccacggcgcctcacgcgtcatgggcaccaacgacggcaaggccctgctgcccgccgtccgcacgctcaagccgccgggccgagcggacctcctctacgccgccgattcgcccgacttctgcgcccccaaccgacgcaccggctcccccggcacgcgcggtcgcgcctgcaatagcagcgccccggacctcagcggctgcgacctgctgtgctgcggccgcgggcaccgccaggagagcgtgcagctcgaagagaactgcctgtgccgcttccactggtgctgcgtagtacagtgccaccgctgccgtgtgcgcaaggagctcagcctctgcctgtgacccgccgcccggccgctagactgacttcgcgcagcggtggctcgcacctgtgggacctcagggcaccggcaccgggcgcctctcgccgctcgagcccagcctctccctgccaaagcccaactcccagggctctggaaatggtgaggcgaggggcttgagaggaacgcccacccacgaaggcccagggcgccagacggccccgaaaaggcgctcggggagcgtttaaaggacactgtacaggccctccctccccttggcctctaggaggaaacagttttttagactggaaaaaagccagtctaaaggcctctggatactgggctccccagaactgctggccacaggatggtgggtgaggttagtatcaataaagatatttaaaccacc

SEQ ID NO: 372 - DNA, 1732 bp, Homo sapiens
gaggggcgggggctggaggcagcagcgcccccgcactccccgcgtctcgcacacttgcaccggtcgctcgcgcgcagcccggcgtcgccccacgccgcgctcgctcctccctccctcctcccgctccgtggctcccgtgctcctggcgaggctcaggcgcggagcgcgcggacgggcgcaccgacagacggccccggggacgcctcggctcgcgcctcccgggcgggctatgttgattgccccgccggggccggcccgcgggatcagcacagcccggcccgcggccccggcggccaatcgggactatgaaccggaaagcgcggcgctgcctgggccacctctttctcagcctgggcatggtctacctccggatcggtggcttctcctcagtggtagctctgggcgcaagcatcatctgtaacaagatcccaggcctggctcccagacagcgggcgatctgccagagccggcccgacgccatcatcgtcataggagaaggctcacaaatgggcctggacgagtgtcagtttcagttccgcaatggccgctggaactgctctgcactgggagagcgcaccgtcttcgggaaggagctcaaagtggggagccgggaggctgcgttcacctacgccatcattgccgccggcgtggcccacgccatcacagctgcctgtacccagggcaacctgagcgactgtggctgcgacaaagagaagcaaggccagtaccaccgggacgagggctggaagtggggtggctgctctgccgacatccgctacggcatcggcttcgccaaggtctttgtggatgcccgggagatcaagcagaatgcccggactctcatgaacttgcacaacaacgaggcaggccgaaagatcctggaggagaacatgaagctggaatgtaagtgccacggcgtgtcaggctcgtgcaccaccaagacgtgctggaccacactgccacagtttcgggagctgggctacgtgctcaaggacaagtacaacgaggccgttcacgtggagcctgtgcgtgccagccgcaacaagcggcccaccttcctgaagatcaagaagccactgtcgtaccgcaagcccatggacacggacctggtgtacatcgagaagtcgcccaactactgcgaggaggacccggtgaccggcagtgtgggcacccagggccgcgcctgcaacaagacggctccccaggccagcggctgtgacctcatgtgctgtgggcgtggctacaacacccaccagtacgcccgcgtgtggcagtgcaactgtaagttccactggtgctgctatgtcaagtgcaacacgtgcagcgagcgcacggagatgtacacgtgcaagtgagccccgtgtgcacaccaccctcccgctgcaagtcagattgctgggaggactggaccgtttccaagctgcgggctccctggcaggatgctgagcttgtcttttctgctgaggagggtacttttcctgggtttcctgcaggcatccgtgggggaaaaaaaatctctcagagccctcaactattctgttccacacccaatgctgctccaccctcccccagacacagcccaggtccctccgcggctggagcgaagccttctgcagcaggaactctggacccctgggcctcatcacagcaatatttaacaatttattctgataaaaataatattaatttatttaattaaaaagaattcttccacaaaaaaaaaaaaaaaaaa

SEQ ID NO: 373 - DNA, 2250 bp, Homo sapiens
gagtctgcccgcagccccctggcccctgcccggccctgcgtgcccgcgcgtccctccggccgcgctgtctatggcgcagcccccctccctggatcatgcacagaaactttcgcaagtggattttctacgtgtttctctgctttggcgtcctgtacgtgaagctcggagcactgtcatccgtggtggccctgggagccaacatcatctgcaacaagattcctggcctagccccgcggcagcgtgccatctgccagagtcggcccgatgccatcattgtgattggggagggggcgcagatgggcatcaacgagtgccagtaccagttccgcttcggacgctggaactgctctgccctcggcgagaagaccgtcttcgggcaagagctccgagtagggagccgtgaggctgccttcacgtacgccatcaccgcggctggcgtggcgcacgccgtcaccgctgcctgcagccaagggaacctgagcaactgcggctgcgaccgcgagaagcagggctactacaaccaagccgagggctggaagtggggcggctgctcggccgacgtgcgttacggcatcgacttctcccggcgcttcgtggacgctcgggagatcaagaagaacgcgcggcgcctcatgaacctgcataacaatgaggccggcaggaaggttctagaggaccggatgcagctggagtgcaagtgccacggcgtgtctggctcctgcaccaccaaaacctgctggaccacgctgcccaagttccgagaggtgggccacctgctgaaggagaagtacaacgcggccgtgcaggtggaggtggtgcgggccagccgtctgcggcagcccaccttcctgcgcatcaaacagctgcgcagctatcagaagcccatggagacagacctggtgtacattgagaagtcgcccaactactgcgaggaggacgcggccacgggcagcgtgggcacgcagggccgtctctgcaaccgcacgtcgcccggcgcggacggctgtgacaccatgtgctgcggccgaggctacaacacccaccagtacaccaaggtgtggcagtgcaactgcaaattccactggtgctgcttcgtcaagtgcaacacctgcagcgagcgcaccgaggtcttcacctgcaagtgaggccaggcccggaggcggccgcgggcaccctggaacccggcggcattttgcacatccactcctcaccttccctgccttggtgctgccagcagcagacatagacgggtgcagaagcggggagctccaggtgcaggagggcaccggccggggcccacgccctctgcccgcctccctggggctccttcctgccacctcctcccatcacctcctgcggcagaacagcacccgtgacccacccagagagcaaggccaggggtcttggtgctccccgacggggcccggcaagttctctttcttctctctgggaaaatgaacgtccaggacacacctgtatcccagagagcaaagtgatgaggagactgagcgtccccagccccacctggcggcatggacacagaaaagctacgccggctggcctctccagaccagttcccaggctgggtctgccgctgggccctggggcggtggggacagatgttgacacaaattatttatgttttcttagtatcagaagaggattctcggcactaacacatagccagtcctaactccgtactctgtgtcagcccatcccctagacaccctctgtttcctttcccggccccacctggccggccctctgcccctgcagagctgaggcagcctggggttgatggggaccacgcggtgcctgcaggtcctagaagtgagctgggcaggggctcttcagaccacacagccctgaccgggccttggaggagagccatggacaggctcctccatgccgtctttccttcttttgaaaatcctatcaatggctgggcgcggtggctcacacctgtaatcccagcactttgggagaccgaggcaggtggatcacctgaggtcaggagttcgagaccagcctggccaacgtggtgaaaccctgtctctactaaaaatacaaaaattagctgggcgtggtggcgtgcacctgtaatcccagctactcaggaggctgagacaggacacttgcttgaacccgggaggtggaggttgcaatgagccaagattgtgccactgtattccaacttgggtgacagagcacgactctgtctcaaaaaaaaaaaaaaaaaaaaaaaaaaaa

SEQ ID NO: 374 - DNA, 1498 bp, Homo sapiens
gggcgatggggaacctgtttatgctctgggcagctctgggcatatgctgtgctgcattcagtgcctctgcctggtcagtgaacaatttcctgataacaggtcccaaggcctatctgacctacacgactagtgtggccttgggtgcccagagtggcatcgaggagtgcaagttccagtttgcttgggaacgctggaactgccctgaaaatgctcttcagctctccacccacaacaggctgagaagtgctaccagagagacttccttcatacatgctatcagctctgctggagtcatgtacatcatcaccaagaactgtagcatgggtgacttcgaaaactgtggctgtgatgggtcaaacaatggaaaaacaggaggccatggctggatctggggaggctgcagcgacaatgtggaatttggggaaaggatctccaaactctttgtggacagtttggagaaggggaaggatgccagagccctgatgaatcttcacaacaacagggccggcagactggcagtgagagccaccatgaaaaggacatgcaaatgtcatggcatctctgggagctgcagcatacagacatgctggctgcagctggctgaattccgggagatgggagactacctaaaggccaagtatgaccaggcgctgaaaattgaaatggataagcggcagctgagagctgggaacagcgccgagggccactgggtgcccgctgaggccttccttcctagcgcagaggcggaactgatctttttagaggaatcaccagattactgtacctgcaattccagcctgggcatctatggcacagagggtcgtgagtgcctacagaacagccacaacacatccaggtgggagcgacgtagctgtgggcgcctgtgcactgagtgtgggctgcaggtggaagagaggaaaactgaggtcataagcagctgtaactgcaaattccagtggtgctgtacggtcaagtgtgaccagtgtaggcatgtggtgagcaagtattactgcgcacgctccccaggcagtgcccagtccctgggtaagggcagtgcctgataataccccacacaagttcacttgattaattgcatcagtggaaggggacatagcttctctcttagagagaacagattggaaagcaatcggaaaattgcagttttggtctgtagtcctcatgatatctgctatcagtggggaaaatggaggcccaagattctacagcatattcctggcggggctgaaattggaacctgggcctcctgactttggcagacccccatttcatctttcctgcaaactactttcccatctttgtgcctgtacttatgcagctttctacagggagagtttggtttggggtctatatctagagggaccttcaaagtatttgttcctttaaatttcagaccatgtccaacccagctgtgctgctgggaatcaggagaatagaagcaaaaaacgaaagagttctgttcagacttctgaagagcagc

SEQ ID NO: 375 - DNA, 1996 bp, Homo sapiens
ggaagttgggctttgagaattccatcccactggcactgaggagaatatttctccgtcttgcttacccatctcccagttttttggaattttctctagctgttactccagaggattatgtttctttcaaagccttctgtgtacatctgtcttttcacctgtgtcctccaactcagccacagctggtcggtgaacaatttcctgatgactggtccaaaggcttacctgatttactccagcagtgtggcagctggtgcccagagtggtattgaagaatgcaagtatcagtttgcctgggaccgctggaactgccctgagagagccctgcagctgtccagccatggtgggcttcgcagtgccaatcgggagacagcatttgtgcatgccatcagttctgctggagtcatgtacaccctgactagaaactgcagccttggagattttgataactgtggctgtgatgactcccgcaacgggcaactggggggacaaggctggctgtggggaggctgcagtgacaatgtgggcttcggagaggcgatttccaagcagtttgtcgatgccctggaaacaggacaggatgcacgggcagccatgaacctgcacaacaacgaggctggccgcaaggcggtgaagggcaccatgaaacgcacgtgcaagtgccacggcgtgtctggcagctgcaccacgcagacctgttggctgcagctgcccgagttccgcgaggtgggcgcgcacctgaaggagaagtaccacgcagcactcaaggtggacctgctgcagggtgctggcaacagcgcggccggccgcggcgccatcgccgacacctttcgctccatctctacccgggagctggtgcacctggaggactccccggactactgcctggagaacaaaacgctagggctgctgggcaccgaaggccgagagtgcctaaggcgcgggcgggccctgggtcgctgggaacgccgcagctgccgccggctctgcggggactgcgggctggcggtggaggagcgccgggccgagaccgtgtccagctgcaactgcaagttccactggtgctgcgcagtccgctgcgagcagtgccgccggagggtcaccaagtacttctgtagccgcgcagagcggccgcgggggggcgctgcgcacaaacccgggagaaaaccctaagggtttcctctgccccctccttttcccactggttcttggcttcctttagagaccccggtaattgtggaacctagggaatggggaacccgctctcccagacctagggatcctgagagggagagactgcaatttctccaaagcttgccactttccagcctgtttccccaattcctctgtgctctcctagagctctgtctgaatcctcgcagccacacctaggtctgagaactcaggctttgagttactgatcttccttggattaggagaacaggtgttcctcctcccctctcctagcagccctaatgtctgacctagcctatcaagccttaggcgctggaagaacccttctcagacacgcaggacccaggtaaagtcaaagctttgcccttttgcccactgtctgctaccagggctcacccactgctgcacctctcttctgcacagctcctcccctgctacctgctgagccagattccccaggaatcttgaatgctttctctcctcttctccctttcctttcccagaaaaactgaggaaactggccccggaaaagcatgtctttggggttggttcctagaggcagaggttgaagatggaagagggagctctggagtgctaacttgaacaccaagggtgctactcatccctatggtatcatatcatgaatggactttactagtggggcaatgactttcctagacaataacccgagggactccagatacataccccgaaggtctaggaaatacgttaagggcagattacagtcatttcctaccctttaaaggtaacttctcccttctcctgacctacttcctcctagcaa

SEQ ID NO: 376 - DNA, 1631 bp, Homo sapiens
ggcgcggcaagatgctggatgggtccccgctggcgcgctggctggccgcggccttcgggctgacgctgctgctcgccgcgctgcgcccttcggccgcctacttcgggctgacgggcagcgagcccctgaccatcctcccgctgaccctggagccagaggcggccgcccaggcgcactacaaggcctgcgaccggctgaagctggagcggaagcagcggcgcatgtgccgccgggacccgggcgtggcagagacgctggtggaggccgtgagcatgagtgcgctcgagtgccagttccagttccgctttgagcgctggaactgcacgctggagggccgctaccgggccagcctgctcaagcgaggcttcaaggagactgccttcctctatgccatctcctcggctggcctgacgcacgcactggccaaggcgtgcagcgcgggccgcatggagcgctgtacctgcgatgaggcacccgacctggagaaccgtgaggcctggcagtgggggggctgcggagacaaccttaagtacagcagcaagttcgtcaaggaattcctgggcagacggtcaagcaaggatctgcgagcccgtgtggacttccacaacaacctcgtgggtgtgaaggtgatcaaggctggggtggagaccacctgcaagtgccacggcgtgtcaggctcatgcacggtgcggacctgctggcggcagttggcgcctttccatgaggtgggcaagcatctgaagcacaagtatgagacggcactcaaggtgggcagcaccaccaatgaagctgccggcgaggcaggtgccatctccccaccacggggccgtgcctcgggggcaggtggcagcgacccgctgccccgcactccagagctggtgcacctggatgactcgcctagcttctgcctggctggccgcttctccccgggcaccgctggccgtaggtgccaccgtgagaagaactgcgagagcatctgctgtggccgcggccataacacacagagccgggtggtgacaaggccctgccagtgccaggtgcgttggtgctgctatgtggagtgcaggcagtgcacgcagcgtgaggaggtctacacctgcaagggctgagttcccaggccctgccagccctgctgcacagggtgcaggcattgcacacggtgtgaagggtctacacctgcacaggctgagttcctgggctcgaccagcccagctgcgtggggtacaggcattgcacacagtgtgaatgggtctacacctgcatgggctgagtccctgggctcagacctagcagcgtggggtagtccctgggctcagtcctagctgcatggggtgcaggcattgcacagagcatgaatgggcctacacctgccaaggctgaatccctgggcccagccagccctgctgcacatggcacaggcattgcacacggtgtgaggagtgtacacctgcaagggctgaggccctgggcccagtcagccctgctgctcagagtgcaggcattgcacatggtgtgagaaggtctacacctgcaagggacgagtccccgggcctggccaaccctgctgtgcagggtgagggccatgcatgctagtatgaggggtctacacctgcaaggactgagaggctttt

SEQ ID NO: 377 - DNA, 1464 bp, Homo sapiens
gcgaggagatgctagagggcgcagcgccgccagcaccatgcgccccccgcccgcgctggccctggccgggctctgcctgctggcgctgcccgccgccgccgcctcctacttcggcctgaccgggcgggaagtcctgacgcccttcccaggattgggcactgcggcagccccggcacagggcggggcccacctgaagcagtgtgacctgctgaagctgtcccggcggcagaagcagctctgccggagggagcccggcctggctgagaccctgagggatgctgcgcacctcggcctgcttgagtgccagtttcagttccggcatgagcgctggaactgtagcctggagggcaggatgggcctgctcaagagaggcttcaaagagacagctttcctgtacgcggtgtcctctgccgccctcacccacaccctggcccgggcctgcagcgctgggcgcatggagcgctgcacctgtgatgactctccggggctggagagccggcaggcctggcagtggggcgtgtgcggtgacaacctcaagtacagcaccaagtttctgagcaacttcctggggtccaagagaggaaacaaggacctgcgggcacgggcagacgcccacaatacccacgtgggcatcaaggctgtgaagagtggcctcaggaccacgtgtaagtgccatggcgtatcaggctcctgtgccgtgcgcacctgctggaagcagctctccccgttccgtgagacgggccaggtgctgaaactgcgctatgactcggctgtcaaggtgtccagtgccaccaatgaggccttgggccgcctagagctgtgggcccctgccaggcagggcagcctcaccaaaggcctggccccaaggtctggggacctggtgtacatggaggactcacccagcttctgccggcccagcaagtactcacctggcacagcaggtagggtgtgctcccgggaggccagctgcagcagcctgtgctgcgggcggggctatgacacccagagccgcctggtggccttctcctgccactgccaggtgcagtggtgctgctacgtggagtgccagcaatgtgtgcaggaggagcttgtgtacacctgcaagcactaggcctactgcccagcaagccagtctggcactgccaggacctcctgtggcacccttcaagctgcccagccggccctctgggcagactgtcatcacatgcatgcataaaccggcatgtgtgccaatgcacacgagtgtgccactcaccaccattccttggccagccttttgcctccctcgatactcaacaaagagaagcaaagcctcctcccttaacccaagcatccccaaccttgttgaggacttggagaggagggcagagtgagaaagacatggagggaaataagggagaccaagagcacagcaggactgaaattttggacgggagagaggggctattccatcttgcttcctgg

SEQ ID NO: 378 - DNA, 4753 bp, Homo sapiens
atgctgaagcggaggcggccgctgctcgaggatcaaacagagcatactgaatcagcaggactggctggtggtgcagcagacatcatgagtaagcaccgagaagtctgttccttatcacgtgtgtaaggggaaaaaggtttaaacaagtctcttaagtggtgtttcctcaccgatggagaattacttccaagcagaagcttacaacctggacaaggtgttagatgaatttgaacaaaacgaagatgaaacagtttcttctactttattggatacaaagtggaataagattctagatcccccttctcaccggctgtcatttaaccctactttggccagtgtgaatgaatctgcagtttctaatgagtcacaaccacaactgaaagtcttctccctggctcattcagctcccctgaccacagaggaagaggatcactgtgctaatggacaggactgtaatctaaatccagagattgccacaatgtggattgatgaaaatgctgttgcagaagaccagttaattaagagaaactatagttgggatgatcaatgcagtgctgttgaagtgggagagaagaaatgtggaaacctggcttgtctgccagatgagaagaatgttcttgttgtagccgtcatgcataactgtgataaaaggacattacaaaacgatttacaggattgtaataattataatagtcaatcccttatggatgcttttagctgttcactggataatgaaaacagacaaactgatcaatttagttttagtataaatgagtccactgaaaaagatatgaattcagagaaacaaatggatccattgaatagaccgaaaacagaggggagatctgttaaccatctgtgtcctacttcatctgatagtctagccagtgtctgttccccttcacaattaaaggatgacggaagtataggtagagacccctccatgtctgcgattacaagtttaacggttgattcagtaatctcatcccagggaacagatggatgtcctgctgttaaaaagcaagagaactatataccagatgaggacctcactggcaaaatcagctctcctaggacagatctagggagtccaaattccttttcccacatgagtgaggggattttgatgaaaaaagagccagcagaggagagcaccactgaagaatccctccggtctggtttacctttgcttctcaaaccagacatgcctaatgggtctggaaggaataatgactgtgaacggtgttcagattgccttgtgcctaatgaagttagggctgatgaaaatgaaggttatgaacatgaagaaactcttggcactacagaattccttaatatgacagagcatttctctgaatctcaggacatgactaattggaagttgactaaactaaatgagatgaatgatagccaagtaaacgaagaaaaggaaaagtttctacagattagtcagcctgaggacactaatggtgatagtggaggacagtgtgttggattggcagatgcaggtctagatttaaaaggaacttgcattagtgaaagtgaagaatgtgatttctccactgttatagacacaccagcagcaaattatctatctaatggttgtgattcctatggaatgcaagacccaggtgtttcttttgttccaaagactttaccctccaaagaagattcagtaacagaagaaaaagaaatagaggaaagcaagtcagaatgctactcaaatatttatgaacagagaggaaatgaggccacagaagggagtggactacttttaaacagcactggtgacctaatgaagaaaaattatttacataatttctgtagtcaagttccatcagtgcttgggcaatcttcccccaaggtagtagcaagcctgccatctatcagtgttccttttggtggtgcaagacccaagcaaccttctaatcttaaacttcaaattccaaagccattatcagaccatttacaaaatgactttcctgcaaacagtggaaataatactaaaaataaaaatgatattcttgggaaagcaaaattaggggaaaactcagcaaccaatgtatgcagtccatctttgggaaacatctctaatgtcgatacaaatggggaacatttagaaagttatgaggctgagatctccactagaccatgccttgcattagctccagatagcccagataatgatctcagagctggtcagtttggaatttctgccagaaagccattcaccactctgggtgaggtggctccagtatgggtaccggattctcaggctccaaattgcatgaaatgtgaagccaggtttacattcaccaaaaggaggcatcactgcagagcatgtgggaaggttttctgtgcttcctgctgtagcctgaaatgtaaactgttatacatggacagaaaggaagctagagtgtgtgtaatctgccattcagtgctaatgaatgtggctcagcccagagagcagaggcgagtttggtttgctgatgggatcttgcccaatggagaagttgctgatgcagccaaattaacaatgaatggaacttcctctgcaggaaccctggctgtgtcacacgacccagtcaagccagtaactaccagtcctctaccagcagagacggatatttgtctattctctgggagtataactcaggttggaagtcctgttggaagtgcaatgaatcttattcctgaagatggccttcctcccattctcatctccactggtgtaaaaggagactatgctgtggaagagaaaccatcacagatttcagtaatgcagcagttggaggatggtggccctgacccacttgtatttgttttaaatgcaaatttgttgtcaatggttaaaattgtaaattatgtgaacaggaagtgctggtgtttcacaaccaagggaatgcatgcagtgggtcagtctgagatagtcattcttctacagtgtttaccggatgaaaagtgtttgccaaaggatatctttaatcactttgtgcagctttatcgggatgctctggcagggaatgtggtgagcaacttgggacattccttcttcagtcaaagtttccttggcagtaaagaacatggtggattcttatatgtgacatctacctaccagtcactgcaagacctagtactcccaaccccaccttacttgtttgggattcttatccagaaatgggaaactccttgggctaaagtatttcctatccgtctgatgttgagacttggagctgaatatcgactttatccatgcccactattcagtgtcagatttcggaagccattgtttggagagacggggcataccatcatgaatcttcttgcagacttcagaaattaccagtataccttgccagtagttcaaggtttggtggttgatatggaagttcggaaaactagcatcaaaattcccagcaacagatacaatgagatgatgaaagccatgaacaagtccaatgagcatgtcctggcaggaggtgcctgcttcaatgaaaaggcagactctcatcttgtgtgtgtacagaatgatgatggaaactatcagacccaggctatcagtattcacaatcagcccagaaaagtgactggtgccagtttctttgtgttcagtggcgctctgaaatcctcttctggataccttgccaagtccagtattgtggaagatggtgttatggtccagattactgcagagaacatggattccttgaggcaggcactgcgagagatgaaggacttcaccatcacctgtgggaaggcggacgcggaggaaccccaggagcacatccacatccagtgggtggatgatgacaagaacgttagcaagggtgtcgtaagtcctatagatgggaagtccatggagactataacaaatgtgaagatattccatggatcagaatataaagcaaatggaaaagtaatcagatggacagaggtgtttttcctagaaaacgatgaccagcacaattgcctcagtgatcctgcagatcacagtagattgactgagcatgttgccaaagctttttgccttgctctctgtcctcacctgaaacttctgaaggaagatggaatgaccaaactgggactacgtgtgacacttgactcagatcaggttggctatcaagcagggagcaatggccagccccttccctcgcagtacatgaatgatctggacagcgccttggtgccggtgatccatggaggggcctgccagcttagtgagggccccgttgtcatggaactcatcttttatattctggaaaacatcgtataaacagagaagacttcatttttttctgttcagacttgttgcaacagcagtcatacccaaatcatttgcactttaaaactggaagattaagcttttgttaacactattaatggggtggggaatagggtgggagtgggggtttgggagacgggtgggaaagggtggttggggggaccgatgttccataattctaagtcttctatgcattgtccaccaagaagatctgggcagcttctgttcctgcacaacagttatgctatccttgcagctaatccccttctgttactgtttagacaagaattccgctcctctctcaagatttacttatggtcatgtgctcagaaatgctcaaatgggtacaaccatcaccaagggtgggatgggagggcagaggggaaataaaatataaagcatcagttcttgcactctttgtacagaattggtataaaaaggataattccacactgaaaaaaaaaaaaaaaa

SEQ ID NO: 379 - DNA, 2245 bp, Homo sapiens
acgcgacccgccctacgggcacctcccgcgcttttcttagcgccgcagacggtggccgagcgggggaccgggaagcatggcccgggggtcggcggttgcctgggcggcgctcgggccgttgttgtggggctgcgcgctggggctgcagggcgggatgctgtacccccaggagagcccgtcgcgggagtgcaaggagctggacggcctctggagcttccgcgccgacttctctgacaaccgacgccggggcttcgaggagcagtggtaccggcggccgctgtgggagtcaggccccaccgtggacatgccagttccctccagcttcaatgacatcagccaggactggcgtctgcggcattttgtcggctgggtgtggtacgaacgggaggtgatcctgccggagcgatggacccaggacctgcgcacaagagtggtgctgaggattggcagtgcccattcctatgccatcgtgtgggtgaatggggtcgacacgctagagcatgaggggggctacctccccttcgaggccgacatcagcaacctggtccaggtggggcccctgccctcccggctccgaatcactatcgccatcaacaacacactcacccccaccaccctgccaccagggaccatccaatacctgactgacacctccaagtatcccaagggttactttgtccagaacacatattttgactttttcaactacgctggactgcagcggtctgtacttctgtacacgacacccaccacctacatcgatgacatcaccgtcaccaccagcgtggagcaagacagtgggctggtgaattaccagatctctgtcaagggcagtaacctgttcaagttggaagtgcgtcttttggatgcagaaaacaaagtcgtggcgaatgggactgggacccagggccaacttaaggtgccaggtgtcagcctctggtggccgtacctgatgcacgaacgccctgcctatctgtattcattggaggtgcagctgactgcacagacgtcactggggcctgtgtctgacttctacacactccctgtggggatccgcactgtggctgtcaccaagagccagttcctcatcaatgggaaacctttctatttccacggtgtcaacaagcatgaggatgcggacatccgagggaagggcttcgactggccgctgctggtgaaggacttcaacctgcttcgctggcttggtgccaacgctttccgtaccagccactacccctatgcagaggaagtgatgcagatgtgtgaccgctatgggattgtggtcatcgatgagtgtcccggcgtgggcctggcgctgccgcagttcttcaacaacgtttctctgcatcaccacatgcaggtgatggaagaagtggtgcgtagggacaagaaccaccccgcggtcgtgatgtggtctgtggccaacgagcctgcgtcccacctagaatctgctggctactacttgaagatggtgatcgctcacaccaaatccttggacccctcccggcctgtgacctttgtgagcaactctaactatgcagcagacaagggggctccgtatgtggatgtgatctgtttgaacagctactactcttggtatcacgactacgggcacctggagttgattcagctgcagctggccacccagtttgagaactggtataagaagtatcagaagcccattattcagagcgagtatggagcagaaacgattgcagggtttcaccaggatccacctctgatgttcactgaagagtaccagaaaagtctgctagagcagtaccatctgggtctggatcaaaaacgcagaaaatacgtggttggagagctcatttggaattttgccgatttcatgactgaacagtcaccgacgagagtgctggggaataaaaaggggatcttcactcggcagagacaaccaaaaagtgcagcgttccttttgcgagagagatactggaagattgccaatgaaaccaggtatccccactcagtagccaagtcacaatgtttggaaaacagcccgtttacttgagcaagactgataccacctgcgtgtcccttcctccccgagtcagggcgacttccacagcagcagaacaagtgcctcctggactgttcacggcagaccagaacgtttctggcctgggttttgtggtcatctattctagcagggaacactaaaggtggaaataaaagattttctattatggaaataaagagttggcatgaaagtggctactgaaaa

SEQ ID NO: 380 - DNA, 1310 bp, Homo sapiens; identical to SEQ ID NO: 130

SEQ ID NO: 381 - DNA, 1435 bp, Homo sapiens
ggcggggcctgcttctcctcagcttcaggcggctgcgacgagccctcaggcgaacctctcggctttcccgcgcggcgccgcctcttgctgcgcctccgcctcctcctctgctccgccaccggcttcctcctcctgagcagtcagcccgcgcgccggccggctccgttatggcgacccgcagccctggcgtcgtgattagtgatgatgaaccaggttatgaccttgatttattttgcatacctaatcattatgctgaggatttggaaagggtgtttattcctcatggactaattatggacaggactgaacgtcttgctcgagatgtgatgaaggagatgggaggccatcacattgtagccctctgtgtgctcaaggggggctataaattctttgctgacctgctggattacatcaaagcactgaatagaaatagtgatagatccattcctatgactgtagattttatcagactgaagagctattgtaatgaccagtcaacaggggacataaaagtaattggtggagatgatctctcaactttaactggaaagaatgtcttgattgtggaagatataattgacactggcaaaacaatgcagactttgctttccttggtcaggcagtataatccaaagatggtcaaggtcgcaagcttgctggtgaaaaggaccccacgaagtgttggatataagccagactttgttggatttgaaattccagacaagtttgttgtaggatatgcccttgactataatgaatacttcagggatttgaatcatgtttgtgtcattagtgaaactggaaaagcaaaatacaaagcctaagatgagagttcaagttgagtttggaaacatctggagtcctattgacatcgccagtaaaattatcaatgttctagttctgtggccatctgcttagtagagctttttgcatgtatcttctaagaattttatctgttttgtactttagaaatgtcagttgctgcattcctaaactgtttatttgcactatgagcctatagactatcagttccctttgggcggattgttgtttaacttgtaaatgaaaaaattctcttaaaccacagcactattgagtgaaacattgaactcatatctgtaagaaataaagagaagatatattagttttttaattggtattttaatttttatatatgcaggaaagaatagaagtgattgaatattgttaattataccaccgtgtgttagaaaagtaagaagcagtcaattttcacatcaaagacagcatctaagaagttttgttctgtcctggaattattttagtagtgtttcagtaatgttgactgtattttccaacttgttcaaattattaccagtgaatctttgtcagcagttcccttttaaatgcaaatcaataaattcccaaaaatttaaaaaaaaaaaaaaaaaaaaaa

SEQ ID NO: 382 - DNA, 21 bp, Artificial Sequence
  Synthetic
  misc_feature 20, 21: Sequence is RNA/DNA hybrid, where n = T
ucgaaguauuccgcguacgnn

SEQ ID NO: 383 - DNA, 21 bp, Artificial Sequence
  Synthetic
  misc_feature 20, 21: Sequence is RNA/DNA hybrid, where n = T
cuaucugucugcucuaguann

SEQ ID NO: 384 - DNA, 21 bp, Artificial Sequence
  Synthetic
  misc_feature 20, 21: Sequence is RNA/DNA hybrid, where n = T
gaggaccuauacuuacgaann

SEQ ID NO: 385 - DNA, 21 bp, Artificial Sequence
  Synthetic
  misc_feature 20, 21: Sequence is RNA/DNA hybrid, where n = T
cucagauggugucugcuaunn

SEQ ID NO: 386 - DNA, 21 bp, Artificial Sequence
  Synthetic
  misc_feature 20, 21: Sequence is RNA/DNA hybrid, where n = T
ccacuaauguccagcguuunn

SEQ ID NO: 387 - DNA, 21 bp, Artificial Sequence
  Synthetic
  misc_feature 20, 21: Sequence is RNA/DNA hybrid, where n = T
gaaugaagguguggcgacann

SEQ ID NO: 388 - DNA, 1407 bp, Homo sapiens
acaaggatgataggatgagaaaaagaaaggacaaatgcaccagaggaggtatgccaaatgggaaacttttcatcactttccagataaaaactagcagtctgtgaaggcaactggtctgatttttcaggtaagaacatatgagaggcaggctgagaccaattttctaccaggccagctaattcttcacaatgacaagctatgggtcatatgctttcaggaaccagacactggaacatgtcgtctgatgtacatcacaccaagaaataaaaaaagaattggaaagccaatgtccaattatttactaaaacagaatctactggagagaaatgcaaaggcaggtaaaaaggcaatctcttaacatgaaaactcacaactgtaaaatgagaacctaaactatacagcgacaaactcaggaaaaagtctccagctactgctgtctctcagactctcacagtatgtgtaaccacttcctcctctgcacgggatcaccccagaagatcaactctactagatcatttgaggacaatgaacaaagtctcaagactgaattcccacagaaaacattctcatgaaaccacccaatattctggtgaagttaaagaagggcatgtgttcggagacaaccagaagcagcaatgctcaaaaccacaaaactctggattgccgactctgcacatcctggttcctctagatacagttcagtggcacattcacaaataaacgttttcaaaaactgccctcaggcagttctagagaaatgctttgacttgcctaatggtataatgtcaagaaaggaagaccagcactgatcattcatactcattattacagtcacagggcactgtctgactcgacagatatagccgagcagttaaaaggttatgggaatttaagtccattatggtcatacgattcttatggacccagagatatgaaattaatcagccacatgtgtagggacaaagtttgtcataaatagatataagttatctgcatgctaagaacttagttacttaactctgtttcctcatgttaatataaacataattatagaatgcaaatgaaatacttagcctggagcctattatataggaagcactcaataatttcaaactattgagtatattattagataggctccataattatttattcctttttcaacagacagtatgatctattgaaaataaagccaaactagatttctttgacccactcctttttctgtttgtattgttggcaagttgttctaaatcaacttgccaacatactattaacatgttattaacatagaagggatgcttattttgtttgctttgtaagaaatgcttctgattcagtaactgggcaatttatttaaatataagtaaaaagcagattttattaaaaactactttgtgctatcat

SEQ ID NO: 389 - DNA, 3844 bp, Homo sapiens
aatccctctacatagaaactgagtgacatgtaaaaatgtgtagctaagtcagggagttacttcctaagagcctgacgctctgcttttcatcaaaaggaaaaaccagcgtgaggcagaggcgagggaggtggaggtgagtggatgatgtgctgagttagggatgtttatatgccgcaaaggtttggttggtaggcttcgcgctaagattagcctggctttgtactgaaaagggggaaggacacatagtgacacagatccttctggtctttcccaggaggtgtgacctaatgaggtttgttgtgagaataaagcaatgtggtttcacatatattatctatcataggctagggactcaagaaatgcatattccccccccactttctttctctctttccttccttccttcctttcttctttctttctttctttctttctttctttctttctttctttctttctttctttctttctctctctctctctctctctctctttctttctttctttttgagatagagtctcactctgtcatccaggctggagtgcagtggcatgatctcagctcactgcagcctccgcatcctgggttcaagcgattttcgtgcctcggccttctgagtagctgggattacaggcgtgcgtgcgccaccacgcctggctaatttttgtatttttagtacagacgaggtttcaccatgttgaccaggctggtcttgaactcctgatcttaagtgatctgcccgccttggcctcccaaagtgctgggattacgggtgggaatcaccatgcccagcctcctttccatcttttctttccttctctggtcttcatactaccaaccaagcaagggaggaggagtaaaaggtaaaatcacaaaatactctggatcggcatttttttttttttttttttttgagacagggtctagctctatggcccaggctggagtgcagtggcacaatcatagctcactgcagcctcaactttctgtgctcgagtgattctcctgcctcagtctcctgagtagctgggaccacagacgtgcactaccacacttggctaattttattttttcagagatcacatgtggtttgagggaggatagagaggacagggtgtcaagaacagcatttttaccaagttgatataaaaatgaaacaggatccaggcatgggtctttacactgatagttacagtaagttttaaaatctgagcagcaatttgaatcacttcttgaaaaacacacaaaatatattttttgtagaggtgggggtcttgctctgttgcccaggctggtcttgaactcgagattctcctgctttggcctcccacaagtgctgggattacaggcgtgagctactgcacccggcctgctttctttttagtgaaaaggatctgtgggagcttttattcccatggctgccttcctcaagtcaacctctttccccggaaatggcatcatctctggactgttgtttctccttcttccttctcctccttctcctcctcctcctcctccaccatgcccggctgatttttgtatttttagtagagacagggtttcactatatgggccaggcagatctcgaactccaaacctcgtgatccacctaccttggcctctgaaagtgctgggataccgtggcctctgaaagtgctgggattacaggcatgagccaccgcgcccggccccgttgtttcccttctaagaaacgcagtggtctctgaagcctgcaggggcaggccagccctgcactgaacgcctgttcttgccaggtggcagaaggttgctgctcatttgagcagtacctgtcacccctcctcccactgctgcggctgttaactcatcttcaggtctcacaccttctgcacataaataagctatttttaaaagttattatttttttactctttcttttctttggagagggtaccaaaggatagctgttctgtttaagtagggacctctcatggcctacaggcttgacatctgagaatcaaactggagaacattccgaagccgttcttataagtgtctccatctctacctgggctgaaatggaatgtgcaaatgtagcccagcctggtccttgggtgttgccagttgattgatgactgggagccaaagtggcatctcctttgacctaaacgggcgatgatgaaataaaactcaacagcctttctctcatcttgcattgtgagatgcgaaatagagcgtgtctctctgcctctcattttaggctgaggccgtccaaagcggccatgccccatgtttccactagatggcgctgacacttcaggcatcaaccctcatggcctctcagccttgcaaaggcagccacttaaagtcggtgtcctgtgtggggcaccaagctgagctgcagacacccagtaggcgcgaggcaaatgcgtcccattttaagaggcttgtatttatgagctctttgcttcctccctcccactaactttaaagaattgctctccatctcctttggcaaagttcctttgccctttgtcttatttttgtgaaaccctccaaggtatttccagtccatttgcatccaatctggcatctttacggagagcggtctcatatgctattgttgttaacgtggactagtatttatgtgttgagaacactggctgtttgtcaggaaaagtgtgccaaaacaaagagtacggccggccctggaaatgcatcagcaaaacccatttcccccgtgcactcattctgagcttccttccttcatttctgtcattactgctgagaactggactgtgcccagctgacctttcccttccttgccctcatcttgctgccagggtctgcaggtttgccaccgtcccggccccagtctgaaacatgggattatttcagaattggaggtggcagcttcagaaaaaaatccttctcgtgtgttgactgctgagatccaggaactgggaaatcaacccccagtttgtagattgctctctttggaaattctgtggcccaacctcgtggctgttttctggaattccttctatcggggcagacagtgctgtgcctttcttgacttcaggatgttccaaggatgctgctggatctgtgtgtgtgtgtgtgtgtgtgtgtgtgtgtgtgtgtgtgtgtgtgtgtgtgcgtgcgtgtatgtgcgcctgaccctgatttctgcaacctccagatttctttcttgacccttcaaagtggaacagtccagtgccaaaaattttagagtttgagaaggtcacagaaatcctctagttggtgcctccacagtcttcattttacagaggaactcagggctaatggagttaatgcaactagatcagggttttgggtctgtgttctttctaccgtcagcacctgtgtggtcaattctggacacttcccagagaagtctttgagtagagaatcctactcaaatttcactgtatattttaagcattcctctcctttccctttgcctcccctgttgccttttcttcccctgatttctcctctggtcatctcctctcccttctgcgtgtaagccatgggaaagggatgagggaggacagcttctggttaaacacaggtccctcttccacatcaaatgaacattggcttcctgggacagaaggccttcaaaggagggattgcaaagcaaggcaaagcgttctgtcttcattttccccatccccatgagacaagactgatggaaagggtggtggggcaacactgcttaatggatgccttttcacatcatttcagtttttagccctcatgactgtattttctaatcagagacaataacattttaaataaaacaacgacaaagaagtctgaaaaaaaaaaaaaaaaaaa

SEQ ID NO: 390 - DNA, 3039 bp, Homo sapiens
gccgcacccactcctgcccctgcctgcaccccacccacttcccggggacttccgagcccacgcccacatcctttacctccaaggggcaaggaagctgttgacttaagatcccatgtggagcagtcagatgctgctggagaactccccgcactgcaggctccagacacacgacctggcccctcccccgtggacgcctatactgctctgttctctaattccagggttcccaacctcggggttgtgccttgcaaatacctgggaaacttttctagctaatgcctaggcccctaccaacccagaaattcccatctaataatctagggtacagcctaggcattgaaacgttaagcctaagagaaatccggcgcacgcatccagtttccaccaccgaatttccagcttcttaaatctgcaggtccagaaaaagaagatgggagtgctgcccacgtcgcgcgctggggctacggccggccccacccctggcgctgccgcggccgtcccgcccttggacttgggcggcgcctggataaacacctgaacctgactgagctccgagccagggactcgggtgcctggggcagacgaggccggcttctccgcggacagctagggagagtgtcctgggtgtcagccagaacatgtctttcaacctgcaatcatcaaagaaactgttcattttcttaggaaaatcactgtttagtcttctggaggctatgatttttgccttactcccaaagccacggaagaacgttgctggtgaaatagtcctcatcacaggtgctggaagtggactcggaaggctcttagccttgcagtttgcccggctgggatctgttcttgttctctgggatatcaataaggaggggaatgaggaaacatgtaagatggctcgggaagctggagccacaagagtgcacgcctatacctgcgattgcagccaaaaggaaggagtgtatagagtagccgaccaggttaaaaaagaagtcggcgatgtttccatcctaatcaacaatgccggaatcgtaacaggcaaaaagttccttgactgtccagatgagcttatggaaaagtcatttgatgtgaatttcaaagcacatttatggacttataaagcctttctacctgctatgattgctaatgaccatggacatttggtttgcatttcaagttcagctggattaagtggagtaaatgggctggcagattactgtgcaagtaaatttgcagcctttgggtttgctgaatctgtatttgtagaaacatttgtccaaaaacaaaaggggatcaaaaccacgattgtgtgccccttttttataaaaactggaatgtttgaaggttgtactacaggctgtccttctctgttgccaattctggaaccaaaatatgcagttgaaaaaatagtagaagctattctacaagaaaaaatgtacttgtatatgccaaagttgttatacttcatgatgtttcttaaaagctttttgcccctcaagacaggactgcttatagctgactatttgggcatccttcatgcaatggatggctttgttgaccaaaagaagaagctctaaagaccaactctatggctaaggtcatctgatacacagtgttacataatgcgtacttcaatgaagaaaagtatttttgtctgacagtggaatatatctggagaccacaagtaccactcctattctgttatctggactagaattttcaatcaatgtgtttgaaaataatgttgctatcacctatttggttgagttttggttttttctttttctttttttttccaaaaataaagacagcccatttttgtcatttccattaccacagatgtaagaaagtgataagccatggccatgagctgccctgagctttggtcgttggggaggtggctcaaatggagccagcggctgtggttgacctgccttggggagcagggctgaggggcgaagaggacatgtggatatccagccagaatgccctctctccagaggacacacagctctggatttctacccccttgctatcctctctggccattttgaacctgtaccacctaatgtagaaaaggcccgcctccagtgcccttctttccaaaacagctacacaaatgcttctgaatgccctggatacgcagaccgagtggcagtctggctaaaggcccatccagcactattgtgcccaagagccttaccgggcattccctgaagccccctcataggcagtgatcctagaccaaactcttaaatagaatcacttttgtttcctagaagagatcaaagagtggttgcttcttactttgaagatgaaattataccaagttaggttttttgctatctattgatccaaaaaatatattcgtgcaattaaagttaagtgttcaacttagtatttcaagttgggattcaggttgaggcattttcctgcagaatgggcaattttatgcatttatattcatcagtgctgccctcactttggatctattgtattcttacagtttaatcaactggcaaagtgctttcatgctttggagattaactataaaagcaagattaagaaaaatatgttaattaccatatccctggaactccttctcaggctggtgggggcagccttgcaagagaaacagcagcctttgtctcttccctcttgtggggagcaaggaggggatgagcggtaccttgggagacccggtaaaagtctaaagaattgagaatttgactatcttgggggtaaaatgctgtcataggggcagcagtctcagggggtgtaaactctggaatccactatggtttaccttgagtggcctgcacgaacatgacagccctgatctgtatttcctttccattcagaaaaccttaaaaaaaaaaaacttgttttatgataatattataacaatcataactaacatttactgtgcccggcagcaaattaagtatttgacaaacattatttcattaaacgagactgtcaatcattactcaaagaatgatgaaggtatttggtgtatgccaaagaataaaggcgttttatttcaaa

SEQ ID NO: 391 - DNA, 4289 bp, Homo sapiens
agcagcgacagagccttcctcaaacctgtagtgactgccacactttgcaaggacaccgtagagggggcatgtccgcgctccaacttcctcccgacgcagcctctgattggctcctgggcttataagaaacgcgtgaatgagcagctgccgcgggcagaaagttgccggaggtctccgggtggtatcgccctttcctctttgccagcccgctggcgagccgagccagggcaagatgaggtcgtcctgtgtcctgctcaccgccctggtggcgctggccgcctattacgtctacatcccgctgcctggctccgtgtccgacccctggaagctgatgctgctggacgccactttccggggtgcacagcaagtgagtaacctgatccactacctgggactgagccatcacctgctggcactgaattttatcattgtttcttttggcaaaaaaagcgcgtggtcttctgcccaagtgaaggtgaccgacacagactttgatggtgtggaagtcagagtgtttgaaggccctccgaagcccgaagagccactgaaacgcagcgtcgtttatatccacggaggaggctgggccttggcaagtgcaaaaatcaggtattatgatgagctgtgtacagcaatggctgaggaattgaatgctgtcattgtttccattgaatacaggctagttccaaaggtttattttcctgagcaaattcatgatgttgtacgggccacaaagtatttcctgaagccagaagtcttacagaagtatatggttgatccaggcagaatttgcatttctggtgacagtgctggtggaaatctggctgctgcccttggacaacagtttactcaagatgccagcctaaaaaataagctcaaactacaagctttaatttatccagttcttcaagctttagattttaacacaccatcttatcagcaaaatgtgaacaccccaatcctgccccgctatgtcatggtgaagtattgggtggactacttcaaaggcaactatgactttgtgcaggcaatgatcgttaacaatcacacttcacttgatgtggaagaggctgctgctgtcagggcccgtctaaactggacatccctcttgcctgcatccttcacaaagaactacaagcctgttgtacagaccacaggcaatgccaggattgtccaggagcttcctcagttgctggatgcccgctccgccccactcattgcagaccaggcagtgctgcagctcctcccaaagacctacattctgacgtgtgagcatgatgtcctcagagacgatggcatcatgtatgccaagcgtttggagagtgccggtgtggaggtgaccctggatcactttgaggatggctttcacggatgtatgattttcactagctggcccaccaacttctcagtgggaatccggactaggaatagttacatcaagtggctagatcaaaacctgtaaaggagcaaaacttccagaagcctcgagcccctcttgacctcctacacctgctttggaaagacatgcactttttagttgactaattcttcctcccattcccctctacttgcgagttatggaatttctattccataactgaagtctttatgataacctaatttttaaaaatgaatttgactaacttaagtgcaaaacatgtaaatttggttcccagagtgggccaatctctctgttcttgttatcttagccaactatactgatacctacagctacagaaagcaggactaggaactggaaataactttgggtcctgccttcattaggacgttctttttagaagcagttcttccagctctggatcatagagtgacctttaataagttaaaaaaacgaggactccttaattctgctagagttaaccttgagttcagagcagtattaaatgcgtgcactttcaggtcagtactggggaccaagtaccctctggtcttttgtgaatggatggttttgtttcctatgggaattttggcaaaggttttctggaaagaacaagtttctcaaaggactttcttcctctagaatgttcattttatgagatcgctatctgtaagtccagttggattacaggaatacttgaaagttactttctaccactattagaaaatatgaagtcgcatgcactggatatctatatatcattaggtttttgttgtgtttttggttatgctgtcccccttctccttggggagatatttgggagcaaacttatttagatttagagtaaacttttcattatagagcaagtaaaaacagacaaatgaaacaacctagtgtttcacataaaaatacttctgacataaagtaccaagagcagtgtgaatatacttggcatagtcaaaaaagaaaatacatttaatattagttcaaaattgttaaaaatacctttagaaggtctagtctattattgaaaactcaattttttcacttatatggctttaaaatggagctattttgctacaatataatgtattgtttatttttttaagttatttaatgttaatatacatagctagacttaaggtttttcagaaagatgtccataataaatattaaaaacaatggtattttttaaaaaactgccttagggttttaaaaccttccctacagttataaccacgtgtaattttgtggaaatgatataacagctattaatactactataacataggcataaatattttcgtgtttatatgcatatacaagttaaaataattagaaactatgactgcgcctagtaaagtcatctaggtttatagttcagtagcttaggcaaggcacacactgctcatctccgctttttagggtcagaggaacacaagctcatgttctgagtgaagggcgtacactggcacctggtgttgcctagatcccccatctcctccttccagccaggtctggaagtttcaacagcccaagcttaacttcatgtaaagtcttcactgccagtgggaacatctttgacacaacaagacactccaattgtgatttgagttgaggatctctgcctgccttcctgccgtccttccttcttccccgatccatgctacttttaggggctgcggagagcagcagcagagctgagtaatgatacagggcaccacggagagaaagtagaaccatttcactcctgggaagatggggtatttcccacttccagcaacgaaataacaaatgaaaagttgcatacttattgatgtattgtatgagccagtagcattttatgtacaaaacagaagtcaatgcaacagtatgtatgtgtgcctgtgtgtgtataaaaataaccattgaagctaacttgctaatgtacttaggcaagccacttcccatctctgggcctcgtctttcctccctctaaaatcaaagagctgaattatgtgatccttgaggtctcttccacttataataccaactgtcttgtcagactggcaaattatattggcctctccttatgtggtggtttttttggtaggtcatagttccttatacacagacacctgcatcatcgaaggtctttttttcctaaaaaaaaaaaatgggattttagttcttattctgtgataactatcctcctcatataatactattctttttgacaccatttgaaggaaccaatatttggaccttattttgaggttgtctgtctcgaagaaaaagaaaataaaatgtataggcagggttccttcaattggcattttccccagaattgtgagccaaagcctatagtaattgcagacagcaaatgattccggatctctaaaaggctctctcagatgaaaagggagtaaaggaaaaaagaggtcaaccactgtttctgataatgtacttgagtttcattgttcttttagtttgtattcttataaaaaatgtttacactctgcagattgattttttttttttagtactgtggctttcttttcctattttatgaaaaaaatgataatctttttgtaaaattgtctgtgaaatataaacattaatatataaagaaaaaccttgaagtgctgtatagtgaagtataaattaatgttttattgatttgtgaagaatttaagactattatataattatcttggtggatctattttatgcatgaccttttaacctttgactttgcttatttcccactacgaaggggaaggtagattttatgaatgattttaatagcaaatatattttataaagtgaaaatccagtgtggaggtagcaaagcatctatctattctgaatcatgtttggaaataaaattgctccatctgggaatgtgctttca

SEQ ID NO: 392 - DNA, 2033 bp, Homo sapiens
gcacataacgggcagaacgcactgcgaagcggcttcttcagagcacgggctggaactggcaggcaccgcgagcccctagcacccgacaagctgagtgtgcaggacgagtccccaccacacccacaccacagccgctgaatgaggcttccaggcgtccgctcgcggcccgcagagccccgccgtgggtccgcccgctgaggcgcccccagccagtgcgctcacctgccagactgcgcgccatggggcaacccgggaacggcagcgccttcttgctggcacccaatagaagccatgcgccggaccacgacgtcacgcagcaaagggacgaggtgtgggtggtgggcatgggcatcgtcatgtctctcatcgtcctggccatcgtgtttggcaatgtgctggtcatcacagccattgccaagttcgagcgtctgcagacggtcaccaactacttcatcacttcactggcctgtgctgatctggtcatgggcctggcagtggtgccctttggggccgcccatattcttatgaaaatgtggacttttggcaacttctggtgcgagttttggacttccattgatgtgctgtgcgtcacggccagcattgagaccctgtgcgtgatcgcagtggatcgctactttgccattacttcacctttcaagtaccagagcctgctgaccaagaataaggcccgggtgatcattctgatggtgtggattgtgtcaggccttacctccttcttgcccattcagatgcactggtaccgggccacccaccaggaagccatcaactgctatgccaatgagacctgctgtgacttcttcacgaaccaagcctatgccattgcctcttccatcgtgtccttctacgttcccctggtgatcatggtcttcgtctactccagggtctttcaggaggccaaaaggcagctccagaagattgacaaatctgagggccgcttccatgtccagaaccttagccaggtggagcaggatgggcggacggggcatggactccgcagatcttccaagttctgcttgaaggagcacaaagccctcaagacgttaggcatcatcatgggcactttcaccctctgctggctgcccttcttcatcgttaacattgtgcatgtgatccaggataacctcatccgtaaggaagtttacatcctcctaaattggataggctatgtcaattctggtttcaatccccttatctactgccggagcccagatttcaggattgccttccaggagcttctgtgcctgcgcaggtcttctttgaaggcctatgggaatggctactccagcaacggcaacacaggggagcagagtggatatcacgtggaacaggagaaagaaaataaactgctgtgtgaagacctcccaggcacggaagactttgtgggccatcaaggtactgtgcctagcgataacattgattcacaagggaggaattgtagtacaaatgactcactgctgtaaagcagtttttctacttttaaagacccccccccccaacagaacactaaacagactatttaacttgagggtaataaacttagaataaaattgtaaaattgtatagagatatgcagaaggaagggcatccttctgccttttttatttttttaagctgtaaaaagagagaaaacttatttgagtgattatttgttatttgtacagttcagttcctctttgcatggaatttgtaagtttatgtctaaagagctttagtcctagaggacctgagtctgctatattttcatgacttttccatgtatctacctcactattcaagtattaggggtaatatattgctgctggtaatttgtatctgaaggagattttccttcctacacccttggacttgaggattttgagtatctcggacctttcagctgtgaacatggactcttcccccactcctcttatttgctcacacggggtattttaggcagggatttgaggagcagcttcagttgttttcccgagcaaagtctaaagtttacagtaaataaattgtttgaccatgcc

SEQ ID NO: 393 - DNA, 2534 bp, Homo sapiens
gggattgggagggcttcttgcaggctgctgggctggggctaagggctgctcagtttccttcagcggggcactgggaagcgccatggcactgcagggcatctcggtcgtggagctgtccggcctggccccgggcccgttctgtgctatggtcctggctgacttcggggcgcgtgtggtacgcgtggaccggcccggctcccgctacgacgtgagccgcttgggccggggcaagcgctcgctagtgctggacctgaagcagccgcggggagccgccgtgctgcggcgtctgtgcaagcggtcggatgtgctgctggagcccttccgccgcggtgtcatggagaaactccagctgggcccagagattctgcagcgggaaaatccaaggcttatttatgccaggctgagtggatttggccagtcaggaagcttctgccggttagctggccacgatatcaactatttggctttgtcaggtgttctctcaaaaattggcagaagtggtgagaatccgtatgccccgctgaatctcctggctgactttgctggtggtggccttatgtgtgcactgggcattataatggctctttttgaccgcacacgcactggcaagggtcaggtcattgatgcaaatatggtggaaggaacagcatatttaagttcttttctgtggaaaactcagaaattgagtctgtgggaagcacctcgaggacagaacatgttggatggtggagcacctttctatacgacttacaggacagcagatggggaattcatggctgttggagcaatagaaccccagttctacgagctgctgatcaaaggacttggactaaagtctgatgaacttcccaatcagatgagcatggatgattggccagaaatgaagaagaagtttgcagatgtatttgcagagaagacgaaggcagagtggtgtcaaatctttgacggcacagatgcctgtgtgactccggttctgacttttgaggaggttgttcatcatgatcacaacaaggaacggggctcgtttatcaccagtgaggagcaggacgtgagcccccgccctgcacctctgctgttaaacaccccagccatcccttctttcaaaagggatcctttcataggagaacacactgaggagatacttgaagaatttggattcagccgcgaagagatttatcagcttaactcagataaaatcattgaaagtaataaggtaaaagctagtctctaacttccaggcccacggctcaagtgaatttgaatactgcatttacagtgtagagtaacacataacattgtatgcatggaaacatggaggaacagtattacagtgtcctaccactctaatcaagaaaagaattacagactctgattctacagtgatgattgaattctaaaaatggttatcattagggcttttgatttataaaactttgggtacttatactaaattatggtagttattctgccttccagtttgcttgatatatttgttgatattaagattcttgacttatattttgaatgggttctagtgaaaaaggaatgatatattcttgaagacatcgatatacatttatttacactcttgattctacaatgtagaaaatgaggaaatgccacaaattgtatggtgataaaagtcacgtgaaacagagtgattggttgcatccaggccttttgtcttggtgttcatgatctccctctaagcacattccaaactttagcaacagttatcacactttgtaatttgcaaagaaaagtttcacctgtattgaatcagaatgccttcaactgaaaaaaacatatccaaaataatgaggaaatgtgttggctcactacgtagagtccagagggacagtcagttttagggttgcctgtatccagtaactcggggcctgtttccccgtgggtctctgggctgtcagctttcctttctccatgtgtttgatttctcctcaggctggtagcaagttctggatcttatacccaacacacagcaacatccagaaataaagatctcaggaccccccagcaagtcgttttgtgtctccttggactgagttaagttacaagcctttcttatacctgtctttgacaaagaagacgggattgtctttacataaaaccagcctgctcctggagcttccctggactcaacttcctaaaggcatgtgaggaaggggtagattccacaatctaatccgggtgccatcagagtagagggagtagagaatggatgttgggtaggccatcaataaggtccattctgcgcagtatctcaactgccgttcaacaatcgcaagaggaaggtggagcaggtttcttcatcttacagttgagaaaacagagactcagaagggcttcttagttcatgtttcccttagcgcctcagtgattttttcatggtggcttaggccaaaagaaatatctaaccattcaatttataaataattaggtccccaacgaattaaatattatgtcctaccaacttattagctgcttgaaaaatataatacacataaataaaaaaa

SEQ ID NO: 394 - DNA, 1864 bp, Homo sapiens
ctggcggctcttgggactggcggggctgcgcgcggggttagggtgggggtacgggaaggctcaacccaggacctgcgtaccttgctttgggggcgcactaagcacctgccgggagcagggggcgcaccgggaactcgcagatttcgccagttgggcgcactggggatctgtggactgcgtccgggggatgggctagggggacatgcgcacgctttgggccttacagaatgtgatcgcgcgagggggagggcgaagcgtggcgggagggcgaggcgaaggaaggagggcgtgagaaaggcgacggcggcggcgcggaggagggttatctatacatttaaaaaccagccgcctgcgccgcgcctgcggagacctgggagagtccggccgcacgcgcgggacacgagcgtcccacgctccctggcgcgtacggcctgccaccactaggcctcctatccccgggctccagacgacctaggacgcgtgccctggggagttgcctggcggcgccgtgccagaagcccccttggggcgccacagttttccccgtcgcctccggttcctctgcctgcaccttcctgcggcgcgccgggacctggagcgggcgggtggatgcaggcgcgatggacggcggcacactgcccaggtccgcgccccctgcgccccccgtccctgtcggctgcgctgcccggcggagacccgcgtccccggaactgttgcgctgcagccggcggcggcgaccggccaccgcagagaccggaggcggcgcagcggccgtagcgcggcgcaatgagcgcgagcgcaaccgcgtgaagctggtgaacttgggcttccaggcgctgcggcagcacgtgccgcacggcggcgccagcaagaagctgagcaaggtggagacgctgcgctcagccgtggagtacatccgcgcgctgcagcgcctgctggccgagcacgacgccgtgcgcaacgcgctggcgggagggctgaggccgcaggccgtgcggccgtctgcgccccgcgggccgccagggaccaccccggtcgccgcctcgccctcccgcgcttcttcgtccccgggccgcgggggcagctcggagcccggctccccgcgttccgcctactcgtcggacgacagcggctgcgaaggcgcgctgagtcctgcggagcgcgagctactcgacttctccagctggttagggggctactgagcgccctcgacctatgagcctcagccccggaagccgagcgagcggccggcgcgctcatcgccggggagcccgccaggtggaccggcccgcgctccgcccccagcgagccggggacccacccaccaccccccgcaccgccgacgccgcctcgttcgtccggcccagcctgaccaatgccgcggtggaaacgggcttggagctggccccataagggctggcggcttcctccgacgccgcccctccccacagcttctcgactgcagtggggcggggggcaccaacacttggagatttttccggaggggagaggattttctaagggcacagagaatccattttctacacattaacttgagctgctggagggacactgctggcaaacggagacctatttttgtacaaagaacccttgacctggggcgtaataaagatgacctggacccctgcccccactatctggagttttccatgctggccaagatctggacacgagcagtccctgaggggcggggtccctggcgtgaggcccccgtgacagcccaccctggggtgggtttgtgggcactgctgctctgctagggagaagcctgtgtggggcacacctcttcaagggagcgtgaactttataaataaatcagttctgtttaaaaaaaaaaaaaaaa

SEQ ID NO: 395 - DNA, 4241 bp, Homo sapiens
actggctccgcgagcctggcccgggggagtcggctggagccggctgcgctttgataaggtcctggcaactcagtaacagcccgagagccgggaaataaaaataacccctcagagcgatggatttcggggccgcccggcggccgaggcgcccgccgaaggccctgctgtaaaagagaggaggttcagatgagcccctgctgacttgagagagacagagagaccacgccgattgctgagaggaactggaagaagaaaaattcccagactcagtgggaagagctccctcaccatgagtagcgctatgttggtgacttgcctcccggaccccagcagcagcttccgtgaggatgccccgcggcccccagtgccaggggaagaaggggagaccccaccgtgtcagccaggggtgggcaagggccaggtcaccaaacccatgcctgtctcttccaacaccaggcggaacgaagatgggttgggggagccggaggggcgggcatctccggattcccctctgacccggtggaccaagtccttacactccttattgggcgatcaagacggtgcttacctgttccgaactttcctggagagggagaaatgcgtggataccttagacttctggtttgcctgcaatggattcaggcagatgaacctgaaggataccaaaactttacgagtagccaaagcgatctacaaaaggtacattgagaacaacagcattgtctccaagcagctgaagcctgccaccaagacctacataagagatggcatcaagaagcagcagattgattccatcatgtttgaccaggcgcagaccgagatccagtcggtgatggaggaaaatgcctaccagatgtttttgacttctgatatatacctcgaatatgtgaggagtgggggagaaaacacagcttacatgagtaatgggggactcgggagcctaaaggtcgtgtgtggctatctccccaccttgaatgaagaagaggagtggacttgtgccgacttcaagtgcaaactttcgccaaccgtggttggcttgtccagcaaaactctgagggccacggcgagtgtgaggtccacggaaactgttgacagtggatacaggtccttcaagaggagcgatcctgttaatccttatcacataggttctggctatgtctttgcaccagccaccagcgccaacgacagtgagatatccagtgatgcgctgacggatgattccatgtccatgacggacagcagtgtagatggaattcctccttatcgtgtgggcagtaagaaacagctccagagagaaatgcatcgcagtgtgaaggccaatggccaagtgtctctacctcatttcccgagaacccaccgcctgcccaaggagatgacccccgtggaacccgccacctttgcagctgagctgatctcgaggctggaaaagctgaagctggagttggagagccgccacagcctggaggagcgcctgcagcagatccgagaggatgaagagagagagggctccgagctcacactcaattcgcgggagggggcgcccacgcagcaccccctctccctactgccctccggcagctacgaggaagacccgcagacgatactggacgatcacctgtccagggtcctcaagacccctggctgccagtctccaggcgtaggccgctatagcccccgctcccgctccccggaccaccaccaccaccaccattcgcagtaccactccctgctcccgcccggtggcaagctgcctcccgcggccgcctcgccgggcgcctgccccctcctcgggggcaaaggctttgtgaccaagcagacgacgaagcatgtccaccaccactacatccaccaccatgccgtccccaagaccaaggaggagatcgaggcggaggccacgcagcgggtgcactgcttctgccctgggggcagcgagtattactgctactcgaaatgcaaaagccactccaaggctccggaaaccatgcccagcgagcagtttggcggcagcagaggcagtaccttgcccaaacgcaatgggaaaggcacggagccgggcctggccctgcccgccagggaaggaggggcccccggcggagctggggccctgcagcttccccgggaggaaggagacaggtcgcaggatgtctggcagtggatgctggagagtgagcggcagagcaagcccaagccccatagtgcccaaagcacaaaaaaggcctaccccttggagtctgcccgctcgtctccaggcgaacgagccagccggcaccatctgtgggggggcaacagcgggcacccccgcaccaccccccgtgcccacctgttcacccaggaccctgcgatgcctcccctgaccccacccaacacgctggctcagctggaggaggcctgtcgcaggctagctgaggtgtcgaagcccccaaagcagcggtgctgtgtggccagtcagcagagggacaggaatcattcggccactgttcagacgggagccacacccttctccaatccaagcctggctccagaagatcacaaagagccaaagaaactggcaggtgtccacgcgctccaggccagtgagttggttgtcacttactttttctgtggggaagaaattccataccggaggatgctgaaggctcagagcttgaccctgggccactttaaagagcagctcagcaaaaagggaaattataggtattacttcaaaaaagcaagcgatgagtttgcctgtggagcggtgtttgaggagatctgggaggatgagacggtgctcccgatgtatgaaggccggattctgggcaaagtggagcggatcgattgagccctggggtctggctttggtgaactgttggagcccgaagctcttgtgaactgtcttggctgtgagcaactgcgacaaaacattttgaaggaaaattaaaccaatgaagaagacaaagtctaaggaagaatcggccagtgggccttcgggagggcggggggaggttgattttcatgattcatgagctgggtactgactgagataagaaaagcctgaactatttattaaaaacatgaccactcttggctattgaagatgctgcctgtatttgagagactgccatacataatatatgacttcctagggatctgaaatccataaactaagagaaactgtgtatagcttacctgaacaggaatccttactgatatttatagaacagttgatttcccccatccccagtttatggatatgctgctttaaacttggaagggggagacaggaagttttaattgttctgactaaacttaggagttgagctaggagtgcgttcatggtttcttcactaacagaggaattatgctttgcactacgtccctccaagtgaagacagactgttttagacagactttttaaaatggtgccctaccattgacacatgcagaaattggtgcgttttgtttttttttttcctatgctgctctgttttgtcttaaaggtcttgagggttgaccatgttgcgtcatcatcaacattttgggggttgtgttggatgggatgatctgttgcagagggagaggcagggaaccctgctccttcgggccccaggttgatcctgtgactgaggctccccctcatgtagcctccccaggcccagggccctgaggcctgctagaatcactgccgctgtgctttcgtggaaatgacagttccttgttttttttgtttctgtttttgttttacattagtcattggaccacagccattcaggaactaccccctgccccacaaagaaatgaacagttgtagggagacccagcagcacctttcctccacacaccttcattttgatgttcgggtttttgtgttaagttaatctgtacattctgtttgccattgttacttgtactatacatctgtatatagtgtacggcaaaagagtattaatccactatctctagtgcttgactttaaatcagtacagtacctgtacctgcacggtcacccgctccgtgtgtcgccctatattgagggctcaagctttcccttgttttttgaaaggggtttatgtataaatatattttatgcctttttattacaagtcttgtactcaatgacttttgtcatgacattttgttctacttatactgtaaattatgcattataaagagttcatttaaggaaaattacttggtacaataattattgtaattaagagatgtagcctttattaaaattttatatttttcaaaaaaaaaaa

SEQ ID NO: 396 - DNA, 2720 bp, Homo sapiens
agaggggcgggagctctggctcaggtaaaaactctttcttcggctcgcgagctgagaggagcaggtagaggggcagaggcgggactgtcgtctgggggagccgcccaggaggctcctcaggccgaccccagaccctggctggccaggatgaagtatctccggcaccggcggcccaatgccaccctcattctggccatcggcgctttcaccctcctcctcttcagtctgctagtgtcaccacccacctgcaaggtccaggagcagccaccggcgatccccgaggccctggcctggcccactccacccacccgcccagccccggccccgtgccatgccaacacctctatggtcacccacccggacttcgccacgcagccgcagcacgttcagaacttcctcctgtacagacactgccgccactttcccctgctgcaggacgtgcccccctctaagtgcgcgcagccggtcttcctgctgctggtgatcaagtcctcccctagcaactatgtgcgccgcgagctgctgcggcgcacgtggggccgcgagcgcaaggtacggggtttgcagctgcgcctcctcttcctggtgggcacagcctccaacccgcacgaggcccgcaaggtcaaccggctgctggagctggaggcacagactcacggagacatcctgcagtgggacttccacgactccttcttcaacctcacgctcaagcaggtcctgttcttacagtggcaggagacaaggtgcgccaacgccagcttcgtgctcaacggggatgatgacgtctttgcacacacagacaacatggtcttctacctgcaggaccatgaccctggccgccacctcttcgtggggcaactgatccaaaacgtgggccccatccgggctttttggagcaagtactatgtgccagaggtggtgactcagaatgagcggtacccaccctattgtgggggtggtggcttcttgctgtcccgcttcacggccgctgccctgcgccgtgctgcccatgtcttggacatcttccccattgatgatgtcttcctgggtatgtgtctggagcttgagggactgaagcctgcctcccacagcggcatccgcacgtctggcgtgcgggctccatcgcaacgcctgtcctcctttgacccctgcttctaccgagacctgctgctggtgcaccgcttcctaccttatgagatgctgctcatgtgggatgcgctgaaccagcccaacctcacctgcggcaatcagacacagatctactgagtcagcatcagggtccccagcctctgggctcctgtttccataggaaggggcgacaccttcctcccaggaagctgagacctttgtggtctgagcataagggagtgccagggaaggtttgaggtttgatgagtgaatattctggctggcgaactcctacacatccttcaaaacccacctggtactgttccagcatcttccctggatggctggaggaactccagaaaatatccatcttctttttgtggctgctaatggcagaagtgcctgtgctagagttccaactgtggatgcatccgtcccgtttgagtcaaagtcttacttccctgctctcacctactcacagacgggatgctaagcagtgcacctgcagtggtttaatggcagataagctccgtctgcagttccaggccagccagaaactcctgtgtccacatagagctgacgtgagaaatatctttcagcccaggagagaggggtcctgatcttaaccctttcctgggtctcagacaactcagaaggttggggggataccagagaggtggtggaataggaccgccccctccttacttgtgggatcaaatgctgtaatggtggaggtgtgggcagaggagggaggcaagtgtcctttgaaagttgtgagagctcagagtttctggggtcctcattaggagcccccatccctgtgttccccaagaattcagagaacagcactggggctggaatgatctttaatgggcccaaggccaacaggcatatgcctcactactgcctggagaagggagagattcaggtcctccagcagcctccctcacccagtatgttttacagattacggggggaccgggtgagccagtgaccccctgtagcccccagcttcaggcctcagtgtctgccagtcaagcttcacaggcattgtgatggggcagccttggggaatataaaattttgtgaagacttggagatctttttttttttttaagcaaatttacaagtttcaacagacaagtccacattcatccctaaaagtctcattttccagtagaaaatatacactggtaaaaacggggcatggggccgtggctcagggctgtaattctagcacattgggagaccaaagtgggaggatcacttgagcccaggagttctggatcctgtctctgcacaaaataaaaaattactcaggcgtggtggtgctcacatgcctgtagtcccagctatacttgggaggctgaggcgagaggatcgcttgagcccaggagttggaggctgcagtgaaccatgattgcgccactgtactccactgggcggcaataagaagacaaaaacataaaacaggacatgtgtgaggcaaaagctgcaggaatttctatcaggcagatctgacctcatcccacccaccccctgctcagatacccttcatagctccttattgctttcagctcataaccccacat

SEQ ID NO: 397 - DNA, 929 bp, Homo sapiens
cggttgtggtcgctatatataaggtggggaggccgccggcccgttcggttccgggcgttaccatcgtccgtgcgcaccgcccggcgtccaggtgagtctcccatctgcagagacgcggacgcgccggcccgcagttggcctgcggagcgcggtggacggtttggcgcccaccaggcgatcaatactttggatttttaatttctagatttggcaattcttcgctgaagtcatcatgagctttttccaactcctgatgaaaaggaaggaactcattcccttggtggtgttcatgactgtggcggcgggtggagcctcatctttcgctgtgtattctctttggaaaaccgatgtgatccttgatcgaaaaaaaaatccagaaccttgggaaactgtggaccctactgtacctcaaaagcttataacaatcaaccaacaatggaaacccattgaagagttgcaaaatgtccaaagggtgaccaaatgacgagccctcgcctctttcttctgaagagtactctataaatctagtggaaacatttctgcacaaactagattctggacaccagtgtgcggaaatgcttctgctacatttttagggtttgtctacattttttgggctctggataaggaattaaaggagtgcagcaataactgcactgtctaaaagtttgtgcttattttcttgtaaatttgaatattgcatattgaaatttttgtttatgatctatgaatgtttttcttaaaatttacaaagctttgtaaattagattttctttaataaaatgccatttgtgcaagatttctcaaagattaggtatatatttaaatggaagagaaaatatttttatgggagaaaaatacatttgaaccatgaaatttcatcttttaaataacatccagtacagatttctgtgtaaaaaaaaaaaaaa

SEQ ID NO: 398 - DNA, 2610 bp, Homo sapiens
aaaaggatggtgcgcctggcggccgagctgctgctgctgctggggctgctgctgctcacgctgcacatcaccgtgctgcgcggctcgggagccgccgacgggcccgacgcggccgcgggcaacgccagccaagcccagctgcagaataacctcaacgtgggaagtgacaccacatcagaaaccagcttttctctctccaaagaagcaccaagggagcatctggaccaccaggctgcacaccaacccttccccagaccgcgattccgacaagagacggggcacccttcattgcaaagagatttccccagatcctttctccttgatctaccaaactttccagatctttccaaagctgatatcaatgggcagaatccaaatatccaggtcaccatagaggtggtcgacggtcctgactctgaagcagataaagatcagcatccggagaataagcccagctggtcagtcccatcccccgactggcgggcctggtggcagaggtccctgtccttggccagggcaaacagcggggaccaggactacaagtacgacagtacctcagacgacagcaacttcctcaacccccccagggggtgggaccatacagccccaggccaccggacttttgaaaccaaagatcagccagaatatgattccacagatggcgagggtgactggagtctctggtctgtctgcagcgtcacctgcgggaacggcaaccagaaacggacccggtcttgtggctacgcgtgcactgcaacagaatcgaggacctgtgaccgtccaaactgcccaggaattgaagacacttttaggacagctgccaccgaagtgagtctgcttgcgggaagcgaggagtttaatgccaccaaactgtttgaagttgacacagacagctgtgagcgctggatgagctgcaaaagcgagttcttaaagaagtacatgcacaaggtgatgaatgacctgcccagctgcccctgctcctaccccactgaggtggcctacagcacggccgacatcttcgaccgcatcaagcgcaaggacttccgctggaaggacgccagcgggcccaaggagaagctggagatctacaagcccactgcccggtactgcatccgctccatgctgtccctggagagcaccacgctggcggcacagcactgctgctacggcgacaacatgcagctcatcaccaggggcaagggggcgggcacgcccaacctcatcagcaccgagttctccgcggagctccactacaaggtggacgtcctgccctggattatctgcaagggtgactggagcaggtataacgaggcccggcctcccaacaacggacagaagtgcacagagagcccctcggacgaggactacatcaagcagttccaagaggccagggaatattaaagagactgggatgaggtggaggacgctgcctctggttctggagcacacacgtgctgcactgacgtgccgactggcgccgagaccttcatagctgcggtcgtgtatatttgtatataccacatgagtatttctcatacattacgctaggggcgtgtgccacgcccaggggactgccttgtgaagccgccctcgccatctgcagagctccttgaaagtgcccctggggagcgatgtgggcagaaggatggggacaacttggaagccagaagaagaacctggaagccacagtgggtgcgactcaattcacacccggatccagagtttcaaagagaggcaaagggggaaagagactgaggttgtaaacgttataagcagtttttatatataacttatttaatacaaatgtgacttaattaagcgtaaccttttctctggagttgtggtgaaactaatcacgtctgtgagagatcagaaagaaagagacttagggaagtggaagagaaagggaattttggaatttatttctttaaaaataatgcaatggaaatatatcaaaacatgtaaacgcccaccttaaaccaaatgttatttggtcatgaggcaccttgctggagtctcagattccaaaagtctcttcttcagactgggtagggaatatgatattttagggacaaagctgaggactggttttaaataggctttaaaataaaagatcaatattatcataatgctatcattctgctaaacggccccaaaacagtagaatttctgctcatgtcctagcaggttcagaagactgcagccaagttcagatgtaaaaacaagaagtagcacttttccaaaggaaaacaacaaaacaaatgggaaaaagataatggaccgcatttcacctattttaatactattttaacaattttttcatctaccaatatatccccaataaataaatataaaagggggggagggtcaatctggggaatcttagttttttatgttttaagaaaacaaaaaaaactgcattatttttgtaaagtatttattgagtcacggattattgtgcatcaagcaattgttaatatgacctggtcctatggggtagaacttaggaaaaataaagttggttcttattcaatattttactttgcaaaattctagtaaaagagagtatataataaaatcataataaaaggtaaaaaaaaaaaaaaaaaa

SEQ ID NO: 399 - DNA, 1460 bp, Homo sapiens
gacggcctggcatacccactgcccaccccagtgactgctcttctgcttcaggcctgctggcctcccagcactgcctgcccctccctgtcgggggacatcgcctccacaccggctggggaaggagcccaggggtggggctggtgggtggggctggtggttggggcagccagagaagtaagagggaagtgagaagccgggtggggcaggctggaaggaagacgaacctacgaagcagagatctgaagacagcatgtacacagccattccccagagtggctctccattcccaggctcagtgcaggatccaggcctgcatgtgtggcgggtggagaagctgaagccggtgcctgtggcgcaagagaaccagggcgtcttcttctcgggggactcctacctagtgctgcacaatggcccagaagaggtttcccatctgcacctgtggataggccagcagtcatcccgggatgagcagggggcctgtgccgtgctggctgtgcacctcaacacgctgctgggagagcggcctgtgcagcaccgcgaggtgcagggcaatgagtctgacctcttcatgagctacttcccacggggcctcaagtaccaggaaggtggtgtggagtcagcatttcacaagacctccacaggagccccagctgccatcaagaaactctaccaggtgaaggggaagaagaacatccgtgccaccgagcgggcactgaactgggacagcttcaacactggggactgcttcatcctggacctgggccagaacatcttcgcctggtgtggtggaaagtccaacatcctggaacgcaacaaggcgagggacctggccctggccatccgggacagtgagcgacagggcaaggcccaggtggagattgtcactgatggggaggagcctgctgagatgatccaggtcctgggccccaagcctgctctgaaggagggcaaccctgaggaagacctcacagctgacaaggcaaatgcccaggccgcagctctgtataaggtctctgatgccactggacagatgaacctgaccaaggtggctgactccagcccatttgcccttgaactgctgatatctgatgactgctttgtgctggacaacgggctctgtggcaagatctatatctggaaggggcgaaaagcgaatgagaaggagcggcaggcagccctgcaggtggccgagggcttcatctcgcgcatgcagtacgccccgaacactcaggtggagattctgcctcagggccatgagagtcccatcttcaagcaatttttcaaggactggaaatgagggtgggcgtcttcctgccccatgctcccctgccccccaccacctgcctgcttgcttctctggctgcctggtcagtgcagaggtgccccctgcagatgttcaataaaggagacaagtgctttcccagctcttttcctgcaccaccaaaaaaaaaaaaaaaaaa

SEQ ID NO: 400 - DNA, 3492 bp, Homo sapiens
caggccgcaggatggcctggtcccgggccgggagcccagcaggccgggagcggctgaggccacaccccgcgggccgggccgcttccctccggtgaatcatcgctcgcagcggcggcgcccgcagtggccgcagcagcgcgccgggccctggccgcgccccagccgagcgcagcgcggagtcgccccgacctttctctgcgcagtacggccgccgggaccgcagcatggcgggcatcgcggccaagctggcgaaggaccgggaggcggccgaggggctgggctcccacgagagggccatcaagtacctcaaccaggactacgaggcgctgcggaacgagtgcctggaggccgggacgctcttccaggacccgtccttcccggccatcccctcggccctgggcttcaaggagttggggccctactccagcaaaacccggggcatcgagtggaagcgccccacggagatctgcgctgacccccagtttatcattggaggagccacccgcacagacatctgccaaggagccctgggtgactgctggctgctggcagccattgcctccctcaccttgaatgaagaaatcctggctcgagtcgtccccctaaaccagagcttccaggaaaactatgcagggatctttcacttccagttctggcaatacggcgagtgggtggaggtggtggtggatgacaggctgcccaccaaggacggggagctgctctttgtgcattcagccgaagggagcgagttctggagcgccctgctggagaaggcatacgccaagatcaacggatgctatgaagcgctatcagggggtgccaccactgagggcttcgaagacttcaccggaggcattgctgagtggtatgagttgaagaagccccctcccaacctgttcaagatcatccagaaagctctgcaaaaaggctctctccttggctgctccatcgacatcaccagcgccgcggactcggaggccatcacgtttcagaagctggtgaaggggcacgcgtactcggtcaccggagccgaggaggttgaaagtaacggaagcctacagaaactgatccgcatccgaaatccctggggagaagtggagtggacagggcggtggaatgacaactgcccaagctggaacactatagacccagaggagagggaaaggctgaccagacggcatgaagatggagaattctggatgtctttcagtgacttcctgaggcactattcccgcctggagatctgtaacctgaccccagacactctcaccagcgatacctacaagaagtggaaactcaccaaaatggatgggaactggaggcggggctccaccgcgggaggttgcaggaactacccgaacacattctggatgaaccctcagtacctgatcaagctggaggaggaggatgaggacgaggaggatggggagagcggctgcaccttcctggtggggctcattcagaagcaccgacggcggcagaggaagatgggcgaggacatgcacaccatcggctttggcatctatgaggttccagaggagttaagtgggcagaccaacatccacctcagcaaaaacttcttcctgacgaatcgcgccagggagcgctcagacaccttcatcaacctccgggaggtgctcaaccgcttcaagctgccgccaggagagtacattctcgtgccttccaccttcgaacccaacaaggatggggatttctgcatccgggtcttttctgaaaagaaagctgactaccaagctgtcgatgatgaaatcgaggccaatcttgaagagttcgacatcagcgaggatgacattgatgatggattcaggagactgtttgcccagttggcaggagaggatgcggagatctctgcctttgagctgcagaccatcctgagaagggttctagcaaagcgccaagatatcaagtcagatggcttcagcatcgagacatgcaaaattatggttgacatgctagattcggacgggagtggcaagctggggctgaaggagttctacattctctggacgaagattcaaaaataccaaaaaatttaccgagaaatcgacgttgacaggtctggtaccatgaattcctatgaaatgcggaaggcattagaagaagcaggtttcaagatgccctgtcaactccaccaagtcatcgttgctcggtttgcagatgaccagctcatcatcgattttgataattttgttcggtgtttggttcggctggaaacgctattcaagatatttaagcagctggatcccgagaatactggaacaatagagctcgaccttatctcttggctctgtttctcagtactttgaagttataactaatctgcctgaagacttctcatgatggaaaatcagccaaggactaagcttccatagaaatacactttgtatctggacctcaaaattatgggaacatttacttaaacggatgatcatagctgaaaataatgatactgtcaatttgagatagcagaagtttcacacatcaaagtaaaagatttgcatatcattatactaaatgcaaatgagtcgcttaacccttgacaaggtcaaagaaagctttaaatctgtaaatagtatacactttttacttttacacactttcctgttcatagcaatattaaatcaggaaaaaaaaatgcagggaggtatttaacagctgagcaaaaacattgagtcgctctcaaaggacacgaggcccttggcagggaatatttaaagcaacttcaagtttaaaatgcagctgttgattctaccaaacaacagtccaagattaccatttcccatgagccaactgggaaacatggtatatcatgaagtaatcttgtcaaggcatctggagagtccaggagagaagactcacctctgtcgcttgggttaaacaagagacaggttttgtagaatattgattggtaatagtaaatcgttctccttacaatcaagttcttgaccctattcggccttatacatctggtcttacaaagaccaaagggatcctgcgcttgatcaactgaaccagtatgccaaaaccaggcatccaatttgtaaaccaattatgataaaggacaaaataagctgtttgccacctcaaaactttatgaacttcaccaccactagtgtctgtccatggagttagaggggacatcacttagaagttcttatagaaaggacacaagtttgtttcctggctttaccttgggaaaatgctagcaacattatagaaattttgccttgttgccttatcttcttccaaatgtactgttaaataaaaataaagggttaccccatgcaatcacaccatgccatgttttccttcctggagggcagccccacaggacggtttatgagcacacaattatagcttgtttctactttaacaaggtatgctgcctctgtaaattcatgtattcaaaggaaaagacaccttgcctataattaaaatgtggaactataaaattttttaaaatccaaaaaa

SEQ ID NO: 401 - DNA, 1867 bp, Homo sapiens
cacatagctcagttcccataaaagggctggtttgccgcgtcggggagtggagtgggacaggtatataaaggaagtacagggcctggggaagaggccctgtctaggtagctggcaccaggagccgtgggcaagggaagaggccacaccctgccctgctctgctgcagccagaatgggtgtgaaggcgtctcaaacaggctttgtggtcctggtgctgctccagtgctgctctgcatacaaactggtctgctactacaccagctggtcccagtaccgggaaggcgatgggagctgcttcccagatgcccttgaccgcttcctctgtacccacatcatctacagctttgccaatataagcaacgatcacatcgacacctgggagtggaatgatgtgacgctctacggcatgctcaacacactcaagaacaggaaccccaacctgaagactctcttgtctgtcggaggatggaactttgggtctcaaagattttccaagatagcctccaacacccagagtcgccggactttcatcaagtcagtaccgccatttctgcgcacccatggctttgatgggctggaccttgcctggctctaccctggacggagagacaaacagcattttaccaccctaatcaaggaaatgaaggccgaatttataaaggaagcccagccagggaaaaagcagctcctgctcagcgcagcactgtctgcggggaaggtcaccattgacagcagctatgacattgccaagatatcccaacacctggatttcattagcatcatgacctacgattttcatggagcctggcgtgggaccacaggccatcacagtcccctgttccgaggtcaggaggatgcaagtcctgacagattcagcaacactgactatgctgtggggtacatgttgaggctgggggctcctgccagtaagctggtgatgggcatccccaccttcgggaggagcttcactctggcttcttctgagactggtgttggagccccaatctcaggaccgggaattccaggccggttcaccaaggaggcagggacccttgcctactatgagatctgtgacttcctccgcggagccacagtccatagaatcctcggccagcaggtcccctatgccaccaagggcaaccagtgggtaggatacgacgaccaggaaagcgtcaaaagcaaggtgcagtacctgaaggacaggcagctggcgggcgccatggtatgggccctggacctggatgacttccagggctccttctgcggccaggatctgcgcttccctctcaccaatgccatcaaggatgcactcgctgcaacgtagccctctgttctgcacacagcacgggggccaaggatgccccgtccccctctggctccagctggccgggagcctgatcacctgccctgctgagtcccaggctgagcctcagtctccctcccttggggcctatgcagaggtccacaacacacagatttgagctcagccctggtgggcagagaggtagggatggggctgtggggatagtgaggcatcgcaatgtaagactcgggattagtacacacttgttgattaatggaaatgtttacagatccccaagcctggcaagggaatttcttcaactccctgccccccagccctccttatcaaaggacaccattttggcaagctctatcaccaaggagccaaacatcctacaagacacagtgaccatactaattataccccctgcaaagcccagcttgaaaccttcacttaggaacgtaatcgtgtcccctatcctacttccccttcctaattccacagctgctcaataaagtacaagagcttaacagtgaaaaaaaaaaaaaaaaaaaaaaaaaaaaaa

SEQ ID NO: 402 - DNA, 813 bp, Homo sapiens
acccgcgcctgaccgcggcagctcccaccatggcggagaccaagctccagctgtttgtcaaggcgagtgaggacggggagagcgtgggtcactgcccctcctgccagcggctcttcatggtcctgctcctcaagggcgtacctttcaccctcaccacggtggacacgcgcaggtccccggacgtgctgaaggacttcgcccccggctcgcagctgcccatcctgctctatgacagcgacgccaagacagacacgctgcagatcgaggactttctggaggagacgctggggccgcccgacttccccagcctggcgcctcgttacagggagtccaacaccgccggcaacgacgttttccacaagttctccgcgttcatcaagaacccggtgcccgcgcaggacgaagccctgtaccagcagctgctgcgcgccctcgccaggctggacagctacctgcgcgcgcccctggagcacgagctggcgggggagccgcagctgcgcgagtcccgccgccgcttcctggacggcgacaggctcacgctggccgactgcagcctcctgcccaagctgcacatcgtcgacacggtgtgcgcgcacttccgccaggcgcccatccccgcggagctgcgcggcgtacgccgctacctggacagcgcgatgcaggagaaagagttcaaatacacgtgtccgcacagcgccgagatcctggcggcctaccggcccgccgtgcacccccgctagcgccccaccccgcgtctgtcgcccaataaaggcatctttgtcgggagtgagggtgtcctgacatctgaagggc

SEQ ID NO: 403 - DNA, 3149 bp, Homo sapiens
ctgagctcagggaggagctccctccaggctctatttagagccgggtaggggagcgcagcggccagatacctcagcgctacctggcggaactggatttctctcccgcctgccggcctgcctgccacagccggactccgccactccggtagcctcatggctgcaacctgtgagattagcaacatttttagcaactacttcagtgcgatgtacagctcggaggactccaccctggcctctgttccccctgctgccacctttggggccgatgacttggtactgaccctgagcaacccccagatgtcattggagggtacagagaaggccagctggttgggggaacagccccagttctggtcgaagacgcaggttctggactggatcagctaccaagtggagaagaacaagtacgacgcaagcgccattgacttctcacgatgtgacatggatggcgccaccctctgcaattgtgcccttgaggagctgcgtctggtctttgggcctctgggggaccaactccatgcccagctgcgagacctcacttccagctcttctgatgagctcagttggatcattgagctgctggagaaggatggcatggccttccaggaggccctagacccagggccctttgaccagggcagcccctttgcccaggagctgctggacgacggtcagcaagccagcccctaccaccccggcagctgtggcgcaggagccccctcccctggcagctctgacgtctccaccgcagggactggtgcttctcggagctcccactcctcagactccggtggaagtgacgtggacctggatcccactgatggcaagctcttccccagcgatggttttcgtgactgcaagaagggggatcccaagcacgggaagcggaaacgaggccggccccgaaagctgagcaaagagtactgggactgtctcgagggcaagaagagcaagcacgcgcccagaggcacccacctgtgggagttcatccgggacatcctcatccacccggagctcaacgagggcctcatgaagtgggagaatcggcatgaaggcgtcttcaagttcctgcgctccgaggctgtggcccaactatggggccaaaagaaaaagaacagcaacatgacctacgagaagctgagccgggccatgaggtactactacaaacgggagatcctggaacgggtggatggccggcgactcgtctacaagtttggcaaaaactcaagcggctggaaggaggaagaggttctccagagtcggaactgagggttggaactatacccgggaccaaactcacggaccactcgaggcctgcaaaccttcctgggaggacaggcaggccagatggcccctccactggggaatgctcccagctgtgctgtggagagaagctgatgttttggtgtattgtcagccatcgtcctgggactcggagactatggcctcgcctccccaccctcctcttggaattacaagccctggggtttgaagctgactttatagctgcaagtgtatctccttttatctggtgcctcctcaaacccagtctcagacactaaatgcagacaacaccttcctcctgcagacacctggactgagccaaggaggcctggggaggccctaggggagcaccgtgatggagaggacagagcaggggctccagcaccttctttctggactggcgttcacctccctgctcagtgcttgggctccacgggcaggggtcagagcactccctaatttatgtgctatataaatatgtcagatgtacatagagatctattttttctaaaacattcccctccccactcctctcccacagagtgctggactgttccaggccctccagtgggctgatgctgggacccttaggatggggctcccagctcctttctcctgtgaatggaggcagagacctccaataaagtgccttctgggctttttctaacctttgtcttagctacctgtgtactgaaatttgggcctttggatcgaatatggtcaagaggttggaggggaggaaaatgaaggtctaccaggctgagggtgagggcaaaggctgacgaagaggggagttacagatttcctgtagcaggtgtgggcttacagacacatggactgggctgggaggcgagcaaaggaagcagctgagactgttggagaacgcttacaagacttcatgcaagcaaggacatgaactcagaacactgaggtcagaagcatcctgctgtcatgacaccgctcgagtgaccttgaccttgaccaagtctgtcctgtttaggactgatttttcctattaggctagggtttggacctgatgttctcaagatgtctagaattgcatggctggccttgtggaatagatggttttgcattccagccaagtgtgctgtaaactgtatatctgtaatatgaatcccagcttttgagtctgacaaaatcagagttaggatcttgtaaaggaaaaaaaaaaaaaaacaaaacaaaatggagatgagtacttgctgagaaagaatgagggaaggagttggcatttgttgaaagtgtagtctttttctcttttttttttaattgcaacttttactttagatttaggaggtcgtgcgcaggtttgttacatgggtatattgtgtgatgctgagcttgggatgcgaatgatcctgtcacccaggtagtgagtatagcacccagtgaaactgtagtctcatgccaggcactgtgctagcccactctggctcatttaatcctctcctaagaagagaggagacacagcgtccccatttgacagatgcagaaagaggttccacaggtgtgccttgattctgtcctaaaaccgtttcccggaagcttttcctggtgtgggcgcttctaacctaatcctcaatcgattccagaactattactctgtttccacagtgatactgtgtctaggttttagggaggacagttcattgatgttacttaagaatgctttccaggtggaaagttccttaagtttgaggcttcaaattccatacagcacattaaaatcccattcatgagtttgaaatactgctctgttgtcttggaaataccaatcagattgttggctgaagtgatgtggataaagaagggatcttagaaaaactaaaaaaaaaaaaaaaaaa

SEQ ID NO: 404 - DNA, 978 bp, Homo sapiens
agtgccgtagcgcccggctcctgcaggcgctcggcctccgctcattcctgaccccgcagtgggcgcgatggcggaggctgtactgagggtcgcccggcggcagctgagccagcgcggcgggtctggagcccccatcctcctgcggcagatgttcgagcctgtgagctgcaccttcacgtacctgctgggtgacagagagtcccgggaggccgttctgatcgacccagtcctggaaacagcgcctcgggatgcccagctgatcaaggagctggggctgcggctgctctatgctgtgaatacccactgccacgcggaccacattacaggctcggggctgctccgttccctcctccctggctgccagtctgtcatctcccgccttagtggggcccaggctgacttacacattgaggatggagactccatccgcttcgggcgcttcgcgttggagaccagggccagccctggccacaccccaggctgtgtcaccttcgtcctgaatgaccacagcatggccttcactggagatgccctgttgatccgtgggtgtgggcggacagacttccagcaaggctgtgccaagaccttgtaccactcggtccatgaaaagatcttcacacttccaggagactgtctgatctaccctgctcacgattaccatgggttcacagtgtccaccgtggaggaggagaggactctgaaccctcggctcaccctcagctgtgaggagtttgtcaaaatcatgggcaacctgaacttgcctaaacctcagcagatagactttgctgttccagccaacatgcgctgtggggtgcagacacccactgcctgatctcacttctgtcagatgctcccatccactattaatgcactaggtgggaggagagggcggcaatgacactgcacctctcctttcccaccgcattccctggagctccctaaataaaactttttttaacgtgaaaaaaaaaaaaaaaa

SEQ ID NO: 405 - DNA, 6829 bp, Homo sapiens
cttctctcccagggcggtgcgacccggagctccagcgcccgagtctccacttcgtttgctgaaacttgctttctaccagctaagaaccatgctgcgagtgattgtggaatctgccagcaatatccctaaaacgaaatttggcaagccggatcctattgtttctgtcatttttaaggatgagaaaaagaaaacaaagaaagttgataatgaattgaaccctgtctggaatgagattttggagtttgacttgaggggtataccactggacttttcatcttcccttgggattattgtgaaagattttgagacaattggacaaaataaattaattggcacggcgactgtagccctgaaggacctgactggtgaccagagcagatccctgccgtacaagctgatctccctgctaaatgaaaaagggcaagatactggggccaccattgacttggtgatcggctatgatccgccttctgctccacatccaaatgacctgagcgggcccagcgtgccaggcatgggaggagatggggaagaagatgaaggtgatgaagacaggttggacaatgcagtcaggggccctgggcccaaggggccagttgggacggtgtcggaagctcagcttgctcggaggctcaccaaagtaaagaacagccggcggatgctgtcaaataagccacaggacttccagatccgcgtccgagtgattgagggccgacagttaagtggtaacaacataaggcctgtggtcaaagttcacgtctgtggccagacacaccgaacaagaatcaagagaggaaacaaccctttttttgatgagttgtttttctacaatgtcaacatgaccccttctgaattgatggatgagatcatcagcatccgggtttataattctcactctctgcgggcagattgtctgatgggggaatttaagattgatgttggatttgtttatgatgaacctggccatgctgtcatgagaaagtggcttcttctcaatgacccggaagataccagttcaggttctaaaggttatatgaaagtcagcatgtttgtcctgggaaccggagatgagcctcctcctgagagacgagatcgtgataatgacagtgatgatgtggagagtaatttgttactccctgctggcattgccctccggtgggtgaccttcttgctgaaaatctaccgagctgaggacatcccccagatggatgatgccttctcacagacagtaaaggaaatatttggaggcaatgcagataagaaaaatctcgtggatccttttgtagaagtttcctttgctggaaaaaaggtttgtacaaacataattgagaaaaatgcaaacccagagtggaatcaggtcgtcaatcttcagatcaagtttccttcagtgtgtgaaaaaataaaactaacaatatatgactgggaccgtcttactaaaaatgatgtagttggaacaacatatctacacctctctaaaattgctgcctctggtggggaagtggaagatttctcatcttcgggaactggggctgcatcatatacagtaaacacaggagaaacagaggtaggctttgttccaacgtttggaccttgttacctgaatctttatggaagccccagggagtacacgggattcccagacccctatgatgagctgaatactggaaagggggaaggagttgcctacagaggcaggatcttggttgaattagccacttttcttgagaagacaccaccagataaaaagcttgagcccatttcaaatgatgacctgctggttgttgagaaataccagcgaaggcggaagtacagcctgtctgccgtgtttcattcagccaccatgttgcaagatgttggtgaggccattcagtttgaagtcagcattgggaactatggcaacaagtttgacaccacctgtaagcctttggcatcaacaactcagtacagccgtgctgtatttgatggcaactactattattacttgccttgggcccacaccaagccagttgttaccctgacttcatactgggaggatattagtcatcgcctggatgcggtgaacactctcctagctatggcagaacggctgcaaacaaatatagaagctctaaaatcagggatacaaggtaaaattcctgcaaaccagctggctgaattgtggctgaagctgatagatgaagttatagaagacacgagatacacgttgcctctcacagaaggaaaagccaacgtcacagttctcgatactcagatccgaaagctgcggtccaggtctctctcccaaatacatgaggcggctgtgaggatgaggtcggaagccacagatgtgaagtccacactggcagaaattgaggactggcttgataaattaatgcagctgactgaagagccacagaacagcatgcctgacatcatcatctggatgatccggggagagaagagactggcctatgcacgaattcccgcacatcaggtcttgtactccaccagtggtgagaatgcatctggaaaatactgtgggaaaacccaaaccatctttctgaagtatccacaggagaaaaacaacgggccaaaggtgcctgtggagttgcgagtgaacatctggctaggcttaagtgctgtggagaagaagtttaacagcttcgcagaaggaactttcaccgtctttgctgaaatgtatgaaaatcaagctctcatgtttggaaaatggggtacttctggattagtaggacgtcataagttttctgatgtcacaggaaaaataaaactcaagagggaattttttctgcctccaaaaggctgggaatgggaaggagagtggatagttgatcctgaaagaagcttgctgactgaggcagatgcaggtcacacggagttcactgatgaagtctatcagaacgagagccgctaccccgggggcgactggaagccggccgaggacacctacacggatgcgaacggcgataaagcagcatcacccagcgagttgacttgtcctccaggttgggaatgggaagatgatgcatggtcttatgacataaatcgagcggtggatgagaaaggctgggaatatggaatcaccattcctcctgatcataagcccaaatcctgggttgcagcagagaaaatgtaccacactcatagacggcgaaggctggtccgaaaacgcaagaaagatttaacacagactgcttcaagcaccgcaagggccatggaggaattgcaagaccaagagggctgggaatatgcttctctaattggctggaaatttcactggaaacaacgtagttcagataccttccgccgcagacgctggaggagaaaaatggctccttcagaaacacatggtgcagctgccatctttaaacttgaaggtgcccttggggcagacactaccgaagatggggatgagaagagcctggagaaacagaagcacagtgccaccactgtgttcggagcaaacacccccattgtttcctgcaattttgacagagtctacatctaccatctgcgctgctatgtctatcaagccagaaacctcttggctttagataaggatagcttttcagatccatatgctcatatctgtttcctccatcggagcaaaaccactgagatcatccattcaaccctgaatcccacgtgggaccaaacaattatattcgatgaagttgaaatctatggggaaccccaaacagttctacagaatccacccaaagttatcatggaactttttgacaatgaccaagtgggcaaagatgaatttttaggacgaagcattttctctcctgtggtgaaactgaactcagaaatggacatcacacccaaacttctctggcacccagtaatgaatggagacaaagcctgcggggatgttcttgtaactgcagagctgattctgaggggcaaggatggctccaaccttcccattcttccccctcaaagggcgccaaatctatacatggtcccccaggggatcaggcctgtggtccagctcactgccattgagattctagcttggggcttaagaaatatgaaaaacttccagatggcttctatcacatcccccagtcttgttgtggagtgtggaggagaaagggtggaatcggtggtgatcaaaaaccttaagaagacacccaactttccaagttctgttctcttcatgaaagtgttcttgcccaaggaggaattgtacatgcccccactggtgatcaaggtcatcgaccacaggcagtttgggcggaagcctgtcgtcggccagtgcaccatcgagcgcctggaccgctttcgctgtgacccttatgcagggaaagaggacatcgtcccacagctcaaagcctcccttctgtctgccccaccatgccgggacatcgttatcgaaatggaagacaccaaaccattactggcttctaagctgacagaaaaggaggaagaaatcgtggactggtggagtaaattttatgcttcctcaggggaacatgaaaaatgcggacagtatattcagaaaggctattccaagctcaagatatataattgtgaactagaaaatgtagcagaatttgagggcctgacagacttctcagatacgttcaagttgtaccgaggcaagtcggatgaaaatgaagatccttctgtggttggagagtttaagggctcctttcggatctaccctctgccggatgaccccagcgtgccagcccctcccagacagtttcgggaattacctgacagcgtcccacaggaatgcacggttaggatttacattgttcgaggcttagagctccagccccaggacaacaatggcctgtgtgacccttacataaaaataacactgggcaaaaaagtcattgaagaccgagatcactacattcccaacactctcaacccagtctttggcaggatgtacgaactgagctgctacttacctcaagaaaaagacctgaaaatttctgtctatgattatgacacctttacccgggatgaaaaagtaggagaaacaattattgatctggaaaaccgattcctttcccgctttgggtcccactgcggcataccagaggagtactgtgtttctggagtcaatacctggcgagatcaactgagaccaacacagctgcttcaaaatgtcgccagattcaaaggcttcccacaacccatcctttccgaagatgggagtagaatcagatatggaggacgagactacagcttggatgaatttgaagccaacaaaatcctgcaccagcacctcggggcccctgaagagcggcttgctcttcacatcctcaggactcaggggctggtccctgagcacgtggaaacaaggactttgcacagcaccttccagcccaacatttcccagggaaaacttcagatgtgggtggatgttttccccaagagtttggggccaccaggccctcctttcaacatcacaccccggaaagccaagaaatactacctgcgtgtgatcatctggaacaccaaggacgttatcttggacgagaaaagcatcacaggagaggaaatgagtgacatctacgtcaaaggctggattcctggcaatgaagaaaacaaacagaaaacagatgtccattacagatctttggatggtgaagggaattttaactggcgatttgttttcccgtttgactaccttccagccgaacaactctgtatcgttgcgaaaaaagagcatttctggagtattgaccaaacggaatttcgaatcccacccaggctgatcattcagatatgggacaatgacaagttttctctggatgactacttgggtttcctagaacttgacttgcgtcacacgatcattcctgcaaaatcaccagagaaatgcaggttggacatgattccggacctcaaagccatgaacccccttaaagccaagacagcctccctctttgagcagaagtccatgaaaggatggtggccatgctacgcagagaaagatggcgcccgcgtaatggctgggaaagtggagatgacattggaaatcctcaacgagaaggaggccgacgagaggccagccgggaaggggcgggacgaacccaacatgaaccccaagctggacttaccaaatcgaccagaaacctccttcctctggttcaccaacccatgcaagaccatgaagttcatcgtgtggcgccgctttaagtgggtcatcatcggcttgctgttcctgcttatcctgctgctcttcgtggccgtgctcctctactctttgccgaactatttgtcaatgaagattgtaaagccaaatgtgtaacaaaggcaaaggcttcatttcaagagtcatccagcaatgagagaatcctgcctctgtagaccaacatccagtgtgattttgtgtctgagaccacaccccagtagcaggttacgccatgtcaccgagccccattgattcccagagggtcttagtcctggaaagtcaggccaacaagcaacgtttgcatcatgttatctcttaagtattaaaagttttattttctaaagtttaaatcatgtttttcaaaatatttttcaaggtggctggttccatttaaaaatcatctttttatatgtgtcttcggttctagacttcagcttttggaaattgctaaatagaattcaaaaatctctgcatcctgaggtgatatacttcatatttgtaatcaactgaaagagctgtgcattataaaatcagttagaatagttagaacaattcttatttatgcccacaaccattgctatattttgtatggatgtcataaaagtctatttaacctctgtaatgaaactaaataaaaatgtttcacctttaaaaaaaaaaaaaaaaaaaaaa

SEQ ID NO: 406 - DNA, 2338 bp, Homo sapiens
ctcaacgtcgaaccgaaggcgacacccacccaactcctccctctccgccccatagtccacccaacacttgcagcccctccagagaaaaagcccagcggaagaggactccggaaaagtgactatctcggaagaccagggtagagctcccgggagaaaaaggcgaagatccccggccccggatcgccatccccttccctggcaccagcttctctaggctgcgcgaaggaagagggtacgacgccggggagggactgggtgcgcgggcatgaagttggaggtgttcgtccctcgcgcggcccacggggacaagcagggcagtgacctggagggcgcgggcggcagcgacgcgccgtccccgctgtcggcggcgggagacgactccctgggctcagatggggactgcgcggccaacagcccggccgcgggcggcggcgccagagatacgcagggcgacggcgaacagagtgcgggaggcgggccgggcgcggaggaggcgatcccggcagcagctgctgcagcggtggtggcggagggcgcggaggccggggcggcggggccaggcgcgggcggcgcggggagcggcgagggtgcacgcagcaagccatatacgcggcggcccaagcccccctactcgtacatcgcgctcatcgccatggccatccgcgactcggcgggcgggcgcttgacgctggcggagatcaacgagtacctcatgggcaagttcccctttttccgcggcagctacacgggctggcgcaactccgtgcgccacaacctttcgctcaacgactgcttcgtcaaggtgctgcgcgacccctcgcggccctggggcaaggacaactactggatgctcaaccccaacagcgagtacaccttcgccgacggggtcttccgccgccgccgcaagcgcctcagccaccgcgcgccggtccccgcgcccgggctgcggcccgaggaggccccgggcctccccgccgccccgccgcccgcgcccgccgccccggcctcgccccgcatgcgctcgcccgcccgccaggaggagcgcgccagccccgcgggcaagttctccagctccttcgccatcgacagcatcctgcgcaagcccttccgcagccgccgcctcagggacacggcccccgggacgacgcttcagtggggcgccgcgccctgcccgccgctgcccgcgttccccgcgctcctccccgcggcgccctgcagggccctgctgccgctctgcgcgtacggcgcgggcgagccggcgcggctgggcgcgcgcgaggccgaggtgccaccgaccgcgccgcccctcctgcttgcacctctcccggcggcggcccccgccaagccactccgaggcccggcggccggcggcgcgcacctgtactgccccctgcggctgcccgcagccctgcaggcggcctcagtccgccgccctggcccgcacctgccgtacccggtggagacgctcctagcctgagtagcgccgcggggcccgggaacgccgagtgcgcgccgtcggggaggcgggaacgcgggcccgcgcgcggactttgcactttgaatccagaggaagatgaatttttaaaatctccatcaaacgtgccttaaagctaaagcattttgacaggagtatttaaacttagtccaggatattttcctttgtgttttataactttacagaggaccaaagcaattcttgttttagtttctttgcgaagcctgctcctccttcccttcataaggactttttttgtctttctttaacgcccaggcttcgtcttatttctactgtttttgtcgcaacttccattgatttatgtcccttccctcccccctaagtacatcagggaacctttccacactataaatgatatgactactgtttggggtttctgggcccccatccgtgtacgtatgtggcatttccaggtatgactgagtgtgagagacatgtcagaggctcttcagtgatttcttgctattgaccgatgcttcactgtgccaaaagagaaaaaaaatgttgggttttgtaattaaattatttatatatttttgaaacccgaattgaaaatgttgcaggcaacgggctacagctttattagtggttctctaactgtggtctccttgggccaagcaatttctttaaaggaaaagttgattatgtatgtggggtgccaggaccactgccttgaaagcaagtgtgatttttatttttaatattattttatttgtgtctgtgtacatattcatgtataaattttatgaaacccaagcatagtgcttattttttaataaaacaactgacttaacacattgtgaaaaaaaaaaaaaaaaaaaa

SEQ ID NO: 407 - DNA, 3690 bp, Homo sapiens
aatcggtccaattctcggccgggaagtctctggccgggacggggcagggcgaacctgccagtgactggactcagcttctttgcgtaaccaatactggaaggcatttaaaggcacctctgccgccacagaccttgcagttaactccgccctgacccacccttcccgatgcagtccctgatgcaggctcccctcctgatcgccctgggcttgcttctcgcggcccctgcgcaagcccacctgaaaaagccatcccagctcagtagcttttcctgggataactgtgatgaagggaaggaccctgcggtgatcagaagcctgactctggagcctgaccccatcatcgttcctggaaatgtgaccctcagtgtcatgggcagcaccagtgtccccctgagttctcctctgaaggtggatttagttttggagaaggaggtggctggcctctggatcaagatcccatgcacagactacattggcagctgtacctttgaacacttctgtgatgtgcttgacatgttaattcctactggggagccctgcccagagcccctgcgtacctatgggcttccttgccactgtcccttcaaagaaggaacctactcactgcccaagagcgaattcgttgtgcctgacctggagctgcccagttggctcaccaccgggaactaccgcatagagagcgtcctgagcagcagtgggaagcgtctgggctgcatcaagatcgctgcctctctaaagggcatataacatggcatctgccacagcagaatggagcggtgtgaggaaggtcccttttcctctgttttgtgtttgccaaggccaaactcccactctctgcccccctttaatcccctttctacagtgagtccactaccctcactgaaaatcattttgtaccacttacattttaggctggggcaagcagccctgacctaagggagaatgagttggacagttcttgatagcccagggcatctgctgggctgaccacgttactcatccccgttaacattctctctaaagagcctcgttcatttccaaagcagttaaggaatgggaaccagagtgttttaggacctgaagaatctttatgactctctctctttcactcttttttttttttgtcactaagttaaaagcgaagtgagagtattaacgtttttgttctcctccggccccctgttacaatgaaggggcaaaagtatttgctcttagtctattcctcccttaacttctgtgactaatttttatttcctttctagatttgcccaattaatactagggtgcagtgtatcctggagaggtagggtgtgtgggggaggaatcccttgggggagatattaggagtgctctgttgtttacaaactcaggtacccgcagggcctagcaagagacttaaatgactgataagaaccgtgagaaacatgttgcttccaggcttgatttcgatttttcgctttttttttttttgagacagaatctcactttgtcaccaggctggagtgcagtggtgcaatctcacctcactgcaacctccgcctcctgggttcaagcaattctcctgcctcagcctcccaagtagcttggactacaggccctgccaccacgcccggctaatttgtgtatttttagtagagatggggtttcaccatgttggccaggatggtctcgatctcttgacctcgtgatctgtccaccttggccttgcaaagcgctggattacaggcatgagccactacacccagccgatttttcctttttgattaaagatgctattacaatgtaaatatttcttacacagaaagtcacagcacatgtgcccattgatacaaggctgctgaggcctggtctccagttggaaatataattaagggtggcaaggactggagtcagttggagagtgcatagccagtctgtgaagacaactgccagatactggcaatactccagcctggtgacagagtgagactctgtctcaaaaaaaaagtttcaatgtttactcctagagaagccaaaaatccagatttgtatatgaaatcttaccattttaaaagattggcagctaattatttttttaaaaagctgtgcagtgtgatgtgtcccaaacggactggctcatgggtggccacgtcacaacctctgatctcagaccgtgcatgccttgtcctcttaagacaactcctgtggcaccgtttctccctccacagggccaaagccatagtgtccggtcccaaggacaaggctcttccagtgctaggagaggtatgagcagcctctcacctgtgagctgtggggatcacaaggctgcctgcctcagtcttggagtcctgttgggtgaatgaggcagatgggaaagagcctcaccagcagctgcttttggagcaggggtccaaggaagagagggtggcctcgacatcaaactgcctggatttttctaccaccctgttacatcataacaacttctgaaacacacaccagccctgagttctgggctcatttgaagcctggaatagcaataaatctttttaacttgcggacagtttccccttgccttggctgcatatttcactgatcacatctcaggatttcaaaagcatttttggggtggggctcttttggttggaagggtttgttggaacggtacaggtgagccgaggtgattccagggacggacccttctgcaggagcttgagcttgcttgttgtctctgcttcatcgccatccagctcccttgtttgctattttgctttccatcacatcatgactgcggagagcaaaaatcacctagtgaccattgaacaggtcccagagacaaaatctttttatctgaggaatttaaaagggagcaaagaccacctggtgactatcaggccatgcagaggcaaaacgccttatttggggaaaattaaaagtaattagactttcctattatctaaagcaggcatctggttccagatttcttttccccgaaaaaaaccttagaagtaactaaaatttctgtacatctccggaatgccatgctgaaactcactgcaaccccacggtcccgctttaaggtccataaatatccctaaggaaaaatccaccgtggtacattcagtcctctcaccgaggtgccccatggcagtcttctgcagcattcttctaatacctttcctttttcaaacctatactgttgttggtgaattctttttaccaacccacgagttgaccacttcccaatgccggggatctgacacctcacctggcaatgacctccacagccgtttccctctgttggatcttccagccttattctcaacagttcatttttagttcacattcttgaccgaatctcagtagctcagttaatctttttatgtctgctctgctcttgggtcatatgttccgtgaggtttcttaggggtgggggatgaggagttaaaggtggcatcttcaatcgcaggtcaaagcagactttaataaatggtgctgagccaactggaaagccccttggagaaagttgaagttagacctgtacttcacaccatatgcaagaatgaactccatctggatccaggatccaaatgtaagaaaatgaagccatataaatacagaaggaaacgtggtggaaatatccagtggcaacaaaatattgacacatttgactacatgaagataataaaaatgcttagtaaaaacacaataaaa

SEQ ID NO: 408 - DNA, 2856 bp, Homo sapiens
gcttcccatacggcagtggctgggggagagtgatggagagaaaggctaagctaaggtcaaagaaagtggaggaaggctggcttgtcccgctggacttgacggcggagctgctgcaatctcgcgggctgggcccttgccccgggtggacccgagtgcctgcggggaggcgggtgtggctcccccgggaggtgacagctggcggggcccgtaaggagctggtctgctccggctcccctctcgtagccggcgccctgggaccagcgcgtgagcacgtctcggaggagtccgatgcgctgggcagggccgggtggtcacccccgcccagcttccaggggtgactgtgcctctgacgtcagacggtttttgggtcattccctggcacggggactttattttcataacagcatgaagtgccgtggaactggaataggcgtgtcctctccctcgaccctccccctccttgtccctctgctcacccctcgctcgttccctccctccggcgagggccgcctttataacaactgctcagagtgcgagggcgggatagctgtccaaggtctcccccagcactgaggagctcgcctgctgccctcttgcgcgcgggaagcagcaccaagttcacggccaacgccttggcactagggtccagaatggctacaacagtccctgatggttgccgcaatggcctgaaatccaagtactacagactttgtgataaggctgaagcttggggcatcgtcctagaaacggtggccacagccggggttgtgacctcggtggccttcatgctcactctcccgatcctcgtctgcaaggtgcaggactccaacaggcgaaaaatgctgcctactcagtttctcttcctcctgggtgtgttgggcatctttggcctcaccttcgccttcatcatcggactggacgggagcacagggcccacacgcttcttcctctttgggatcctcttttccatctgcttctcctgcctgctggctcatgctgtcagtctgaccaagctcgtccgggggaggaagcccctttccctgttggtgattctgggtctggccgtgggcttcagcctagtccaggatgttatcgctattgaatatattgtcctgaccatgaataggaccaacgtcaatgtcttttctgagctttccgctcctcgtcgcaatgaagactttgtcctcctgctcacctacgtcctcttcttgatggcgctgaccttcctcatgtcctccttcaccttctgtggttccttcacgggctggaagagacatggggcccacatctacctcacgatgctcctctccattgccatctgggtggcctggatcaccctgctcatgcttcctgactttgaccgcaggtgggatgacaccatcctcagctccgccttggctgccaatggctgggtgttcctgttggcttatgttagtcccgagttttggctgctcacaaagcaacgaaaccccatggattatcctgttgaggatgctttctgtaaacctcaactcgtgaagaagagctatggtgtggagaacagagcctactctcaagaggaaatcactcaaggttttgaagagacaggggacacgctctatgccccctattccacacattttcagctgcagaaccagcctccccaaaaggaattctccatcccacgggcccacgcttggccgagcccttacaaagactatgaagtaaagaaagagggcagctaactctgtcctgaagagtgggacaaatgcagccgggcggcagatctagcgggagctcaaagggatgtgggcgaaatcttgagtcttctgagaaaactgtacaagacactacgggaacagtttgcctccctcccagcctcaaccacaattcttccatgctggggctgatgtgggctagtaagactccagttcttagaggcgctgtagtatttttttttttttgtctcatcctttggatacttcttttaagtgggagtctcaggcaactcaagtttagacccttactctttttgtttgttttttgaaacaggatcttgctctgtcacccaggcttgagtgcagtggtgcgatcacagcccagtgcagcctcgaccacctgtgctcaagcaatcctcccatctccatctcccaaagtgctgggatgacaggcgtgagccacagctcccagcctaggcccttaatcttgctgttattttccatggactaaaggtctggtcatctgagctcacgctggctcacacagctctaggggcctgctcctctaactcacagtgggttttgtgaggctctgtggcccagagcagacctgcatatctgagcaaaaatagcaaaagcctctctcagcccactggcctgaatctacactggaagccaacttgctggcacccccgctccccaacccttcttgcctgggtaggagaggctaaagatcaccctaaatttactcatctctctagtgctgcctcacattgggcctcagcagctccccagcaccaattcacaggtcacccctctcttcttgcactgtccccaaacttgctgtcaattccgagatctaatctccccctacgctctgccaggaattctttcagacctcactagcacaagcccggttgctccttgtcaggagaatttgtagatcattctcacttcaaattcctggggctgatacttctctcatcttgcaccccaacctctgtaaatagatttaccgcatttacggctgcattctgtaagtgggcatggtctcctaatggaggagtgttcattgtataataagttattcacctgagtatgcaataaagatgtggtggccactctttcatggtggtggcagcagttaccagtaaaaaaa

SEQ ID NO: 409 - DNA, 906 bp, Homo sapiens
tttgggtttggacgggtgcgtttgtttctcatagtgcaggtctggagccggactgagatggggagtagagggaccccttgaaacttcagggtggatgaatatgaagtttcatcaccagctgtgatgtttgatattggactgtggttgtgccagttgacactcaggagtggagactagatctgcaatctgttgggactgtgatgaggggatcatcctgccctcgaaccagacccagccctgtagcccaggcactattgcctggagttcctgggctctcagcgccaggaaatcatgaggttcagtgtctcaggcatgaggaccgactaccccaggagtgtgctggctcctgcttatgtgtcagtctgtctcctcctcttgtgtccaagggaagtcatcgctcccgctggctcagaaccatggctgtgccagccggcacccaggtgtggagacaagatctacaaccccttggagcagtgctgttacaatgacgccatcgtgtccctgagcgagacccgccaatgtggtcccccctgcaccttctggccctgctttgagctctgctgtcttgattcctttggcctcacaaacgattttgttgtgaagctgaaggttcagggtgtgaattcccagtgccactcatctcccatctccagtaaatgtgaaagcagaagacgttttccctgagaagacatagaaagaaaatcaactttcactaaggcatctcagaaacataggctaaggtaatatgtgtaccagtagagaagcctgaggaatttacaaaatgatgcagctccaagccattgtatggcccatgtgggagactgatgggacatggagaatgacagtagattatcaggaaataaataaagtggtttttccaatgtacacacctgtacccaaaaaaaa

SEQ ID NO: 410 - DNA, 2381 bp, Homo sapiens
ttccactgaagtggccaagggagttgagctgagcagggggaggggaagatctacacccatcccccttcctctagccctccctgcgtttagattcagttgcaccttttattattttaactcttctccttaggacacgcagcccccaatttgtccctccggcctgggcggcccctggtcccgcgcgccagcatgggagagcgagggacctgcccgcggcccgccggcgtgtgcaaggaggtccagccgccgcgcccgctacccggagtctgaggacgggtgtccagggacggagaggcaggtgagagggaggtggctaagctggctatggtgacaggacgatgttggccagaaagagtatcatcccggaggagtatgtgctggcgcgcatcgccgcagagaacctgcgcaagccgcgcatccgagaccgcctccccaaagcccgcttcatcgccaagagcggggcctgcaacctggcgcataagaacatccgtgagcaaggacgctttctacaggacatcttcaccaccttggtggacctgaaatggcgccacacgctggtcatctttaccatgtccttcctctgcagctggctgctcttcgctatcatgtggtggctggtggcctttgcccatggggacatctatgcttacatggagaaaagtggaatggagaaaagtggtttggagtccactgtgtgtgtgactaatgtcaggtctttcacttctgcttttctcttctccattgaagttcaagttaccattgggtttggagggaggatgatgacagaggaatgccctttggccatcacggttttgattctccagaatattgtgggtttgatcatcaatgcagtcatgttaggctgcattttcatgaaaacagctcaggctcacagaagggcagaaactttgattttcagccgccatgctgtgattgccgtccgaaatggcaagctgtgcttcatgttccgagtgggtgacctgaggaaaagcatgatcattagtgcctctgtgcgcatccaggtggtcaagaaaacaactacacctgaaggggaggtggttcctattcaccaactggacattcctgttgataacccaatcgagagcaataacatttttctggtggcccctttgatcatctgccacgtgattgacaagcgcagtcccctgtatgacatctcagcaactgacctggccaaccaagacttggaggtcatagttattctggaaggagtggttgaaactactggcatcaccacacaagcacgaacctcctacattgctgaggagatccaatggggccaccgctttgtgtccattgtgactgaggaagaaggagtgtattctgtggattactccaaatttggcaacactgttaaagtagctgctccacggtgcagtgcccgagagctggatgagaaaccttccatccttattcagaccctccaaaagagtgaactgtctcatcaaaattctctgaggaagcgcaactccatgagaagaaacaattccatgaggaggaacaattctatccgaaggaacaattcttccctcatggtaccaaaggtgcaatttatgactccagaaggaaatcaaaacacatcggaatcatgacagcaagataaccccaagacagtcttttatcaagttttgacggtttatgctgggcactgccagactgaaccagagctggaacacaataatgtgtccttctacattttattacactaaatgatattcatattcaagcaacagcactttctgtagtaataaaaagtaacacaccaagtggaggattcatggcttatgcttgtttcatacatgtagaattcgcagtgatatacttaagttatgtgcaggggtgggtatgctcgtttctctcaatttgaaacacaagaattacactaatagtaacaggccttgagcacaaaatttggtcaagaaatgagtctgtttgaaatgcttagttggtgaaacccagatcgctgtgttactaatgatcactctggaaatgcaaatagaataggaggggaaaaaacaaaatcatgttaatgcgttttgtacatcagccttctcctgtctccatgataactgcatttggtaggaagcctgaggcaaaaactgcttaagtggatctgtttgtaagtggattcagttcattcgctttgtctgtcggtgactcctgaaggtttcctggtccatctcattgcggcctgttgggcagagctggacaaggtgtctttgaaggaaagctaagtcttgtctcatttaggactgggttccccacagtgacagtcacttccttcagcatctcacttcttcttctagaatccccacagggaaatactgtattgaatattttattaaaacattttctttgta

SEQ ID NO: 411 - DNA, 7080 bp, Homo sapiens
gagctagcgctcaagcagagcccagcgcggtgctatcggacagagcctggcgagcgcaagcggcgcggggagccagcggggctgagcgcggccagggtctgaacccagatttcccagactagctaccactccgcttgcccacgccccgggagctcgcggcgcctggcggtcagcgaccagacgtccggggccgctgcgctcctggcccgcgaggcgtgacactgtctcggctacagacccagagggagcacactgccaggatgggagctgctgggaggcaggacttcctcttcaaggccatgctgaccatcagctggctcactctgacctgcttccctggggccacatccacagtggctgctgggtgccctgaccagagccctgagttgcaaccctggaaccctggccatgaccaagaccaccatgtgcatatcggccagggcaagacactgctgctcacctcttctgccacggtctattccatccacatctcagagggaggcaagctggtcattaaagaccacgacgagccgattgttttgcgaacccggcacatcctgattgacaacggaggagagctgcatgctgggagtgccctctgccctttccagggcaatttcaccatcattttgtatggaagggctgatgaaggtattcagccggatccttactatggtctgaagtacattggggttggtaaaggaggcgctcttgagttgcatggacagaaaaagctctcctggacatttctgaacaagacccttcacccaggtggcatggcagaaggaggctatttttttgaaaggagctggggccaccgtggagttattgttcatgtcatcgaccccaaatcaggcacagtcatccattctgaccggtttgacacctatagatccaagaaagagagtgaacgtctggtccagtatttgaacgcggtgcccgatggcaggatcctttctgttgcagtgaatgatgaaggttctcgaaatctggatgacatggccaggaaggcgatgaccaaattgggaagcaaacacttcctgcaccttggatttagacacccttggagttttctaactgtgaaaggaaatccatcatcttcagtggaagaccatattgaatatcatggacatcgaggctctgctgctgcccgggtattcaaattgttccagacagagcatggcgaatatttcaatgtttctttgtccagtgagtgggttcaagacgtggagtggacggagtggttcgatcatgataaagtatctcagactaaaggtggggagaaaatttcagacctctggaaagctcacccaggaaaaatatgcaatcgtcccattgatatacaggccactacaatggatggagttaacctcagcaccgaggttgtctacaaaaaaggccaggattataggtttgcttgctacgaccggggcagagcctgccggagctaccgtgtacggttcctctgtgggaagcctgtgaggcccaaactcacagtcaccattgacaccaatgtgaacagcaccattctgaacttggaggataatgtacagtcatggaaacctggagataccctggtcattgccagtactgattactccatgtaccaggcagaagagttccaggtgcttccctgcagatcctgcgcccccaaccaggtcaaagtggcagggaaaccaatgtacctgcacatcggggaggagatagacggcgtggacatgcgggcggaggttgggcttctgagccggaacatcatagtgatgggggagatggaggacaaatgctacccctacagaaaccacatctgcaatttctttgacttcgatacctttgggggccacatcaagtttgctctgggatttaaggcagcacacttggagggcacggagctgaagcatatgggacagcagctggtgggtcagtacccgattcacttccacctggccggtgatgtagacgaaaggggaggttatgacccacccacatacatcagggacctctccatccatcatacattctctcgctgcgtcacagtccatggctccaatggcttgttgatcaaggacgttgtgggctataactctttgggccactgcttcttcacggaagatgggccggaggaacgcaacacttttgaccactgtcttggcctccttgtcaagtctggaaccctcctcccctcggaccgtgacagcaagatgtgcaagatgatcacagaggactcctacccggggtacatccccaagcccaggcaagactgcaatgctgtgtccaccttctggatggccaatcccaacaacaacctcatcaactgtgccgctgcaggatctgaggaaactggattttggtttatttttcaccacgtaccaacgggcccctccgtgggaatgtactccccaggttattcagagcacattccactgggaaaattctataacaaccgagcacattccaactaccgggctggcatgatcatagacaacggagtcaaaaccaccgaggcctctgccaaggacaagcggccgttcctctcaatcatctctgccagatacagccctcaccaggacgccgacccgctgaagccccgggagccggccatcatcagacacttcattgcctacaagaaccaggaccacggggcctggctgcgcggcggggatgtgtggctggacagctgccggtttgctgacaatggcattggcctgaccctggccagtggtggaaccttcccgtatgacgacggctccaagcaagagataaagaacagcttgtttgttggcgagagtggcaacgtggggacggaaatgatggacaataggatctggggccctggcggcttggaccatagcggaaggaccctccctataggccagaattttccaattagaggaattcagttatatgatggccccatcaacatccaaaactgcactttccgaaagtttgtggccctggagggccggcacaccagcgccctggccttccgcctgaataatgcctggcagagctgcccccataacaacgtgaccggcattgcctttgaggacgttccgattacttccagagtgttcttcggagagcctgggccctggttcaaccagctggacatggatggggataagacatctgtgttccatgacgtcgacggctccgtgtccgagtaccctggctcctacctcacgaagaatgacaactggctggtccggcacccagactgcatcaatgttcccgactggagaggggccatttgcagtgggtgctatgcacagatgtacattcaagcctacaagaccagtaacctgcgaatgaagatcatcaagaatgacttccccagccaccctctttacctggagggggcgctcaccaggagcacccattaccagcaataccaaccggttgtcaccctgcagaagggctacaccatccactgggaccagacggcccccgccgaactcgccatctggctcatcaacttcaacaagggcgactggatccgagtggggctctgctacccgcgaggcaccacattctccatcctctcggatgttcacaatcgcctgctgaagcaaacgtccaagacgggcgtcttcgtgaggaccttgcagatggacaaagtggagcagagctaccctggcaggagccactactactgggacgaggactcagggctgttgttcctgaagctgaaagctcagaacgagagagagaagtttgctttctgctccatgaaaggctgtgagaggataaagattaaagctctgattccaaagaacgcaggcgtcagtgactgcacagccacagcttaccccaagttcaccgagagggctgtcgtagacgtgccgatgcccaagaagctctttggttctcagctgaaaacaaaggaccatttcttggaggtgaagatggagagttccaagcagcacttcttccacctctggaacgacttcgcttacattgaagtggatgggaagaagtaccccagttcggaggatggcatccaggtggtggtgattgacgggaaccaagggcgcgtggtgagccacacgagcttcaggaactccattctgcaaggcataccatggcagcttttcaactatgtggcgaccatccctgacaattccatagtgcttatggcatcaaagggaagatacgtctccagaggcccatggaccagagtgctggaaaagcttggggcagacaggggtctcaagttgaaagagcaaatggcattcgttggcttcaaaggcagcttccggcccatctgggtgacactggacactgaggatcacaaagccaaaatcttccaagttgtgcccatccctgtggtgaagaagaagaagttgtgaggacagctgccgcccggtgccacctcgtggtagactatgacggtgactcttggcagcagaccagtgggggatggctgggtcccccagcccctgccagcagctgcctgggaaggccgtgtttcagccctgatgggccaagggaaggctatcagagaccctggtgctgccacctgcccctactcaagtgtctacctggagcccctggggcggtgctggccaatgctggaaacattcactttcctgcagcctcttgggtgcttctctcctatctgtgcctcttcagtgggggtttggggaccatatcaggagacctgggttgtgctgacagcaaagatccactttggcaggagccctgacccagctaggaggtagtctggagggctggtcattcacagatccccatggtcttcagcagacaagtgagggtggtaaatgtaggagaaagagccttggccttaaggaaatctttactcctgtaagcaagagccaacctcacaggattaggagctggggtagaactggctatccttggggaagaggcaagccctgcctctggccgtgtccacctttcaggagactttgagtggcaggtttggacttggactagatgactctcaaaggcccttttagttctgagattccagaaatctgctgcatttcacatggtacctggaacccaacagttcatggatatccactgatatccatgatgctgggtgccccagcgcacacgggatggagaggtgagaactaatgcctagcttgaggggtctgcagtccagtagggcaggcagtcaggtccatgtgcactgcaatgccaggtggagaaatcacagagaggtaaaatggaggccagtgccatttcagaggggaggctcaggaaggcttcttgcttacaggaatgaaggctgggggcattttgctggggggagatgaggcagcctctggaatggctcagggattcagccctccctgccgctgcctgctgaagctggtgactacggggtcgccctttgctcacgtctctctggcccactcatgatggagaagtgtggtcagaggggagcaatgggctttgctgcttatgagcacagaggaattcagtccccaggcagccctgcctctgactccaagagggtgaagtccacagaagtgagctcctgccttagggcctcatttgctcttcatccagggaactgagcacagggggcctccaggagaccctagatgtgctcgtactccctcggcctgggatttcagagctggaaatatagaaaatatctagcccaaagccttcattttaacagatggggaaagtgagcccccaagatgggaaagaaccacacagctaagggagggcctggggagccccaccctagcccttgctgccacaccacattgcctcaacaaccggccccagagtgcccaggcactcctgaggtagcttctggaaatggggacaagtcccctcgaaggaaaggaaatgactagagtagaatgacagctagcagatctcttccctcctgctcccagcgcacacaaacccgccctccccttggtgttggcggtccctgtggccttcactttgttcactacctgtcagcccagcctgggtgcacagtagctgcaactccccattggtgctacctggctctcctgtctctgcagctctacaggtgaggcccagcagagggagtagggctcgccatgtttctggtgagccaatttggctgatcttgggtgtctgaacagctattgggtccaccccagtccctttcagctgctgcttaatgccctgctctctccctggcccaccttatagagagcccaaagagctcctgtaagagggagaactctatctgtggtttataatcttgcacgaggcaccagagtctccctgggtcttgtgatgaactacatttatcccctttcctgccccaaccacaaactctttccttcaaagagggcctgcctggctccctccacccaactgcacccatgagactcggtccaagagtccattccccaggtgggagccaactgtcagggaggtctttcccaccaaacatctttcagctgctgggaggtgaccatagggctctgcttttaaagatatggctgcttcaaaggccagagtcacaggaaggacttcttccagggagattagtggtgatggagaggagagttaaaatgacctcatgtccttcttgtccacggttttgttgagttttcactcttctaatgcaagggtctcacactgtgaaccacttaggatgtgatcactttcaggtggccaggaatgttgaatgtctttggctcagttcatttaaaaaagatatctatttgaaagttctcagagttgtacatatgtttcacagtacaggatctgtacataaaagtttctttcctaaaccattcaccaagagccaatatctaggcattttcttggtagcacaaattttcttattgcttagaaaattgtcctccttgttatttctgtttgtaagacttaagtgagttaggtctttaaggaaagcaacgctcctctgaaatgcttgtcttttttctgttgccgaaatagctggtcctttttcgggagttagatgtatagagtgtttgtatgtaaacatttcttgtaggcatcaccatgaacaaagatatattttctatttatttattatatgtgcacttcaagaagtcactgtcagagaaataaagaattgtcttaaatgtc

SEQ ID NO: 412 - DNA, 10511 bp, Homo sapiens
gcaggtccgggaggcgcaggcggagagcggcggtgcccccgagcccctctgcggacggctcaggcgggaggaccccgcgcggctggatggcggcggccgcgcggcctcggggtcgggcactggggccagtactgccgccgacgccgctgctcctgctggtactgcgggtgctgccagcctgcggggcgaccgctcgggatcccggggccgcggccgggctcagccttcacccgacttacttcaacctggccgaggcggcgaggatttgggccaccgccacctgcggggagaggggacccggcgaggggaggccccagcccgagctctactgcaagttggtcgggggccccaccgccccaggcagcggccacaccatccagggccagttctgtgactattgcaattctgaagaccccaggaaagcacatcctgtcaccaatgccatcgatggatctgaacgttggtggcaaagccctcccctgtcctcaggcacacagtacaacagagtcaacctcaccttggatctggggcagctcttccatgtggcctatattttaatcaaatttgcaaattctcctcgccctgatctttgggtcttggaaagatctgtagactttggaagcacctactcaccatggcaatattttgctcattctaaagtagactgtttaaaagaatttgggcgggaggcaaatatggctgtcacccgggatgatgatgtactttgtgttactgaatattcccgtattgtacctttggaaaatggtgaggttgtggtgtccttgataaacggtcgtccaggtgcaaaaaattttactttctctcacaccctgagggagtttaccaaggcaacaaacatccgcttgcgttttcttagaaccaatacgcttcttggacacctcatctccaaagcccagcgagatccaactgtcactcggcggtattattacagcataaaggacatcagcattggtgggcagtgtgtttgcaatggccatgctgaagtgtgcaatataaacaatcctgaaaaactgtttcggtgtgaatgccagcaccacacctgtggggagacgtgtgatcgctgctgcacagggtacaatcagaggcgctggcggcccgccgcttgggagcagagccacgagtgtgaagcatgcaactgccacggccatgccagcaactgttactatgatccagatgttgagcggcagcaggcaagcttgaatacccagggcatctatgctggtggaggggtctgcattaactgtcagcacaacacagctggagtaaactgtgaacagtgtgctaagggctattaccgcccttatggggttccagtggatgcccctgatggctgcatcccctgcagctgtgaccctgagcatgcggatggctgtgaacagggttcaggccgctgtcactgcaagccaaatttccacggagacaactgtgagaagtgtgcaattggatactacaatttcccattttgcttgagaattcccatttttcctgtttctacaccaagttcagaagatccagtagctggagatataaaagggtgtgactgtaatctggaaggtgttctccctgaaatatgtgatgcccacggacggtgcctgtgccgccctggggttgagggccctcgatgtgatacctgccgctctggtttctactcattccctatttgccaagcctgctggtgttcagcccttggatcctaccagatgccctgcagctcagtgactggacagtgtgaatgtcggccaggagttacaggacagcggtgtgacaggtgtctctcaggagcttatgatttcccccactgccaaggttccagcagtgcttgtgacccagctggtaccatcaactccaatttggggtattgccaatgcaagcttcatgttgaaggtcctacttgtagccgctgcaaactgttatattggaatctggacaaagaaaaccccagtggatgttcagaatgcaagtgccataaggcgggaacagtgagtggaactggagagtgtaggcagggagatggtgactgtcactgcaagtcccatgtgggtggcgattcctgcgacacctgtgaagatggatattttgctttggaaaagagcaattactttgggtgtcaagggtgtcagtgtgacattggtggggcattgtcctccatgtgcagtgggccctcgggagtgtgccagtgccgagagcatgtcgtgggaaaggtgtgccagcggcctgaaaacaactactatttcccagatttgcatcatatgaagtatgagattgaagacggcagcacacctaatgggagagaccttcgatttggatttgatccgctggcatttcctgagtttagctggagaggatatgcccaaatgacctcagtacagaatgatgtaagaataacattgaatgtagggaagtcaagtggctccttgtttcgtgttattctgagatacgttaaccctggaactgaagcagtatctggccatataactatttatccatcctggggtgctgctcaaagcaaagagatcatcttcctgccgagtaaggagccagcctttgtcactgtccctggaaatggttttgcagacccattttcaatcacaccaggaatatgggttgcttgtattaaggcagaaggagtccttctggattacctggtgctgctccccagggactactatgaagcctctgtactgcagctgccagtcacagaaccatgtgcctacgcaggacctccccaagaaaattgcttactctaccagcatttgccagtgaccagattcccctgtaccctggcttgtgaggccagacacttcctgcttgatggggagccaagacccgtggcagtgaggcagcccacacctgcacaccctgtcatggtggacctcagcgggagagaggtggaattgcatctgcggctgcgcatcccacaggttggccactacgtggttgtggtcgagtattccacggaggcagctcagctgtttgtggttgatgtgaatgtgaagagctccgggtctgttctggcaggccaggtgaacatttacagctgcaactacagtgttctctgccggagtgctgtgattgatcacatgagccgcatcgccatgtatgagctattggcagatgcagacattcagctcaagggacacatggcccgattccttctgcatcaagtttgtatcatacctattgaagaattctcagctgagtatgtgagaccacaagtccactgcattgccagttatgggcgatttgtcaatcaaagtgccacctgtgtctccttggcccatgaaactcctccaacagcattaattttggatgttctaagtggcaggcctttccctcacctgccccagcagtcgtcaccttctgttgatgttcttcctggggtcaccttgaaggcaccgcagaatcaagtgaccctgagaggacgtgtaccacacctgggccgatacgtctttgtcatccatttttaccaagcagcgcacccgacgtttcccgcgcaggtgtcggtggatggcgggtggccacgggcaggctccttccatgcctctttttgcccccatgtgcttggctgccgggatcaagtgattgccgaaggccagattgagtttgacatctcagagcctgaagtggccgcaactgtgaaggttccagaaggaaagtccttggttttggtccgtgttctagtggtgcctgcagaaaactatgactaccaaatacttcacaaaaaatccatggacaagtcactcgagtttatcaccaattgtggaaaaaacagcttttaccttgacccccagacagcctccagattctgtaagaattccgccaggtccctggtggccttttaccacaagggcgccctgccttgtgagtgccaccccactggggccaccggccctcactgcagccctgagggtgggcagtgcccatgccagcccaacgtcatcgggcggcagtgcacccgctgtgcaacaggccactacggattcccacgctgcaagccgtgcagctgtggtcggcgcctttgtgaagagatgacggggcagtgccgctgccctccccgcacggtcaggccccagtgtgaggtgtgtgagacacactcattcagcttccaccccatggccggctgcgaaggctgcaactgttccaggaggggcaccatcgaggctgccatgccggagtgtgaccgggacagcgggcagtgcagatgcaagcccagaatcacagggcggcagtgtgaccgatgtgcttccgggttttaccgctttcctgagtgtgttccctgcaattgcaacagagatgggactgagccaggagtgtgtgacccagggaccggggcttgcctctgcaaggaaaatgtagaaggcacagagtgtaatgtgtgtcgagaaggctcattccatttggacccagccaatctcaagggttgtaccagctgtttctgttttggagtaaataatcaatgtcacagctcacataagcgaaggactaagtttgtggatatgctgggctggcacctggagacagcagacagagtggacatccctgtctctttcaacccaggcagcaacagtatggtggcggatctccaggagctgcccgcaaccatccacagcgcgtcctgggtcgcacccacctcctacctgggggacaaggtttcttcatatggtggttacctcacttaccaagccaagtcctttggcttgcctggcgacatggttcttctggaaaagaagccggatgtacagctcactggtcagcacatgtccatcatctatgaggagacaaacaccccacggccagaccggctgcatcatggacgagtgcacgtggtcgagggaaacttcagacatgccagcagccgtgccccagtgtctagggaggagctgatgacagtgctgtctagactggcagatgtgcgcatccaaggcctctacttcacagagactcaaaggctcaccctgagcgaggtggggctagaggaagcctctgacacaggaagtgggcgcatagcacttgctgtggaaatctgtgcctgcccccctgcctacgctggtgactcttgtcagggttgtagccctggatactatcgggatcataaaggcttgtataccggacggtgtgttccctgcaattgcaacggacattcaaatcaatgccaggatggctcaggcatatgtgttaactgtcagcacaacaccgcgggagagcactgtgaacgctgccaggagggctactatggcaacgccgtccacggatcctgcagggcctgcccatgtcctcacactaacagctttgccactggctgtgtggtgaatgggggagacgtgcggtgctcctgcaaagctgggtacacaggaacacagtgtgaaaggtgtgcaccgggatatttcgggaatccccagaaattcggaggtagctgccaaccatgcagttgtaacagcaatggccagctgggcagctgtcatcccctgactggagactgcataaaccaagaacccaaagatagcagccctgcagaagaatgtgatgattgcgacagctgtgtgatgaccctcctgaacgacctggccaccatgggcgagcagctccgcctggtcaagtctcagctgcagggcctgagtgccagcgcagggcttctggagcagatgaggcacatggagacccaggccaaggacctgaggaatcagttgctcaactaccgttctgccatttcaaatcatggatcaaaaatagaaggcctggaaagagaactgactgatttgaatcaagaatttgagactttgcaagaaaaggctcaagtaaattccagaaaagcacaaacattaaacaacaatgttaatcgggcaacacaaagcgcaaaagaactggatgtgaagattaaaaatgtcatccggaatgtgcacattcttttaaagcagatctctgggacagatggagagggaaacaacgtgccttcaggtgacttttccagagagtgggctgaagcccagcgcatgatgagggaactgcggaacaggaactttggaaagcacctcagagaagcagaagctgataaaagggagtcgcagctcttgctgaaccggataaggacctggcagaaaacccaccagggggagaacaatgggcttgctaacagtatccgggattctttaaatgaatacgaagccaaactcagtgaccttcgtgctcggctgcaggaggcagctgcccaagccaagcaggcaaatggcttgaaccaagaaaacgagagagctttgggagccattcagagacaagtgaaagaaataaattccctgcagagtgatttcaccaagtatctaaccactgcagactcatctttgttgcaaaccaacattgcgctgcagctgatggagaaaagccagaaggaatatgaaaaattagctgccagtttaaatgaagcaagacaagaactaagtgacaaagtaagagaactttccagatctgctggcaaaacatcccttgtggaggaggcagaaaagcacgcgcggtccttacaagagctggcaaagcagctggaagagatcaagagaaacgccagcggggatgagctggtgcgctgtgctgtggatgccgccaccgcctacgagaacatcctcaatgccatcaaagcggccgaggacgcagccaacagggctgccagtgcatctgaatctgccctccagacagtgataaaggaagatctgccaagaaaagctaaaaccctgagttccaacagtgataaactgttaaatgaagccaagatgacacaaaagaagctaaagcaagaagtcagtccagctctcaacaacctacagcaaaccctgaatattgtgacagttcagaaagaagtgatagacaccaatctcacaactctccgagatggtcttcatgggatacagagaggtgatattgatgctatgatcagtagtgcaaagagcatggtcagaaaggccaacgacatcacagatgaggttctggatgggctcaaccccatccagacagatgtggaaagaattaaggacacctatgggaggacacagaacgaagacttcaaaaaggctctgactgatgcagataactcggtgaataagttaaccaacaaactacctgatctttggcgcaagattgaaagtatcaaccaacagctgttgcccttgggaaacatctctgacaacatggacagaatacgagaactaattcagcaggccagagatgctgccagtaaggttgctgtccccatgaggttcaatggtaaatctggagtcgaagtccgactgccaaatgacctggaagatttgaaaggatatacatctctgtccttgtttctccaaaggcccaactcaagagaaaatgggggtactgagaatatgtttgtgatgtaccttggaaataaagatgcctcccgggactacatcggcatggcagttgtggatggccagctcacctgtgtctacaacctgggggaccgtgaggctgaactccaagtggaccagatcttgaccaagagtgagactaaggaggcagttatggatcgggtgaaatttcagagaatttatcagtttgcaaggcttaattacaccaaaggagccacatccagtaaaccagaaacacccggagtctatgacatggatggtagaaatagcaatacactccttaatttggatcctgaaaatgttgtattttatgttggaggttacccacctgattttaaacttcccagtcgactaagtttccctccatacaaaggttgtattgaattagatgacctcaatgaaaatgttctgagcttgtacaacttcaaaaaaacattcaatctcaacacaactgaagtggagccttgtagaaggaggaaggaagagtcagacaaaaattattttgaaggtacgggctatgctcgagttccaactcaaccacatgctcccatcccaacctttggacagacaattcagaccaccgtggatagaggcttgctgttctttgcagaaaacggggatcgcttcatatctctaaatatagaagatggcaagctcatggtgagatacaaactgaattcagagctaccaaaagagagaggagttggagacgccataaacaacggcagagaccattcgattcagatcaaaattggaaaactccaaaagcgtatgtggataaatgtggacgttcaaaacactataattgatggtgaagtatttgatttcagcacatattatctgggaggaattccaattgcaatcagggaaagatttaacatttctacgcctgctttccgaggctgcatgaaaaatttgaagaaaaccagtggtgtcgttagattgaatgatactgtgggagtaaccaaaaagtgctcggaagactggaagcttgtgcgatctgcctcattctccagaggaggacaattgagtttcactgatttgggcttaccacctactgaccacctccaggcctcatttggatttcagacctttcaacccagtggcatattattagatcatcagacatggacaaggaacctgcaggtcactctggaagatggttacattgaattgagcaccagcgatagcggcagcccaatttttaaatctccacagacgtatatggatggtttactgcattatgtatctgtaataagcgacaactctggactacggcttctcatcgatgaccagcttctgagaaatagcaaaaggctaaaacacatttcaagttcccggcagtctctgcgtctgggcgggagcaattttgagggttgtattagcaatgtttttgtccagaggttatcactgagtcctgaagtcctagatttgaccagtaactctctcaagagagatgtgtccctgggaggctgcagtttaaacaaaccaccttttctaatgttgcttaaaggttctaccaggtttaacaagaccaagacttttcgtatcaaccagctgttgcaggacacaccagtggcctccccaaggagcgtgaaggtgtggcaagatgcttgctcaccacttcccaagacccaggccaatcatggagccctccagtttggggacattcccaccagccacttgctattcaagcttcctcaggagctgctgaaacccaggtcacagtttgctgtggacatgcagacaacatcctccagaggactggtgtttcacacgggcactaagaactcctttatggctctttatctttcaaaaggacgtctggtctttgcactggggacagatgggaaaaaattgaggatcaaaagcaaggagaaatgcaatgatgggaaatggcacacggtggtgtttggccatgatggggaaaaggggcgcttggttgtggatggactgagggcccgggagggaagtttgcctggaaactccaccatcagcatcagagcgccagtttacctgggatcacctccatcagggaaaccaaagagcctccccacaaacagctttgtgggatgcctgaagaactttcagctggattcaaaacccttgtataccccttcttcaagcttcggggtgtcttcctgcttgggtggtcctttggagaaaggcatttatttctctgaagaaggaggtcatgtcgtcttggctcactctgtattgttggggccagaatttaagcttgttttcagcatccgcccaagaagtctcactgggatcctaatacacatcggaagtcagcccgggaagcacttatgtgtttacctggaggcaggaaaggtcacggcctctatggacagtggggcaggtgggacctcaacgtcggtcacaccaaagcagtctctgtgtgatggacagtggcactcggtggcagtcaccataaaacaacacatcctgcacctggaactggacacagacagtagctacacagctggacagatccccttcccacctgccagcactcaagagccactacaccttggaggtgctccagccaatttgacgacactgaggatccctgtgtggaaatcattctttggctgtctgaggaatattcatgtcaatcacatccctgtccctgtcactgaagccttggaagtccaggggcctgtcagtctgaatggttgtcctgaccagtaacccaagcctatttcacagcaaggaaattcaccttcaaaagcactgattacccaatgcacctccctccccagctcgagatcattcttcactcaggacacaaaccagacaggtttaatagcgaatctaattttgaattctgaccatggatacccatcactttggcattcagtgctacatgtgtattttatataaaaatcccatttcttgaagataaaaaaattgttattcaaattgttatgcacagaatgtttttggtaatattaatttccactaaaaaattaaatgtcttttaagaaacattcttttccacttgttaaaaaaattaaatatattttaaagcactttaagaatatgaaactttcatatatgttaaaggattataatttatggaattaaaaaatgcagtgtagtccttaaaaaaaa

SEQ ID NO: 413 - DNA, 6289 bp, Homo sapiens
tggggttttgatgtgttgcccaggctggtcttgaactcctgagcttaagtgatgtgtccgcctgggcctcccaaagtgctggaattacagacatgagtggcaataaaaggggtagcagagcttcctgccctcaccgtggtgccgagtgcctgctgccttgggccgccttgaacctccagggtttccagctcctcctccttcaccccagtgccactgccatgatggatgtgagtgaacttggggagtctgcccgctacctccgccagggctaccaggagatgacgaaggtgcacactatcccatgggacgggaagaagcgagtctgggtgcctgatgaacaggacgcctacgtggaggccgaggtcaagtcggaggctaccgggggcagagtcaccgtggagaccaaagaccagaaggtgctgatggtgcgtgaagccgagctgcagcccatgaacccgcctcgcttcgacttactggaggacatggccatgatgacgcacctgaacgaggcctctgtgctgcacaacctgcgccagcgctatgcccgctggatgatctatacctactcaggcctcttctgtgtcaccatcaacccctacaaatggctcccagtctatacggcctccgtagtggctgcttacaagggaaagcgccgctcagattccccgccccatatatatgcggtggcggacaacgcctacaacgacatgctgcgcaaccgagacaaccagtccatgctgatcaccggagagtcgggggccggtaagacggttaacaccaagcgggtcattcagtactttgccatcgtcgctgccctgggagacgggccgggcaagaaggcccaatttctggcaacaaagacggggggcacccttgaggatcaaatcatcgaggccaaccctgccatggaggcctttggcaacgccaagaccctgaggaatgataactcctcccgctttggcaagttcatccgcattcactttggtccctctgggaagctggcatccgcggatattgacagctatctcctggagaagtcgcgggtgatcttccagttgcctggtgagcgcagctaccatgtctactaccagatcctctcagggaggaagccagagctgcaggacatgctgcttctgtctatgaacccctatgactaccacttctgcagccagggcgtcatcaccgtggacaacatgaatgatggggaggagctcatcgccaccgaccatgccatggacatcctaggcttcagcgtggatgagaaatgtgcctgctataagatcgtgggcgccctcctgcactttggcaacatgaagttcaagcagaagcagcgggaggagcaggcggaggccgatggcactgagagtgctgacaaggctgcctacctgatgggggtcagcagtggggacctcctcaaaggccttttgcacccccgggtgcgtgtagggaacgagtacgtgaccaagggccagagtgtggagcaggtggtgtttgctgtgggggctctggccaaggccacctatgaccggctgttcaggtggctggtgtctcggatcaaccagaccctggacacaaagctgccccggcagttcttcatcggggttctggacatcgctgggtttgagatctttgagttcaacagcttcgaacagctgtgcatcaacttcaccaatgagaaattgcagcagttcttcaaccagcacatgtttgtgctggagcaggaggagtacaagcgggagggcatcgactgggtcttcatcgacttcggccttgacctgcagccttgcatcgacctcatcgagaagccactgggcatcctgtccatcctggaggaggaatgcatgttccccaaggcctcagacgccagcttccgggccaagctctacgacaaccacgcggggaagtcacccaatttccagcagcctcggcctgacaagaagcgcaagtaccaggcccacttcgaggtggtccactacgcaggcgtggtgccttacagcattgtgggctggctggagaaaaacaaggatcccctgaatgagaccgtggtccccatcttccagaagtcacagaataggctcctggcgactctctatgagaattatgcgggctcctgctccactgagccccccaagtctggggtgaaagagaagcgtaagaaggcagcatcgttccagacggtgtcccagctgcacaaggagaacctcaacaagctgatgaccaacctgcgggccacacagccccacttcgtccgctgcattgtccccaacgagaacaaaaccccaggggtcatggatgccttcttggtgctacaccagctgcgctgcaatggggtcctggaggggatccggatctgccgccaagggttccccaacaggttgctctacaccgacttccggcagcggtaccgtatcctgaaccccagtgccatcccggatgacaccttcatggacagcaggaaggccacagagaaactgctgggctcgctggacttggatcacacccagtaccagtttggccacaccaaggtgttcttcaaggctgggcttctaggcgtcctggaagagctccgtgaccagcgcctggccaaggtgctgacgctgctgcaggcgcggagccgtggccgcctcatgcgccttgagtaccagcgcctgctgggaggcagggatgcgctgttcaccatccagtggaacatccgtgccttcaatgccgtcaagaactggtcatggatgaagctctttttcaagatgaagccgctgctgcgctcggcgcaggctgaggaggagctggcggccctgcgggcagagctgcgggggttgcgaggggcgctggctgcggccgaggccaagcgccaggaactggaggagacgcacgtcagcatcacccaggagaagaatgacctggccctgcagctgcaggctgagcaggacaacctggcagatgccgaggagcgctgccacttgctgatcaagtccaaggtgcagctggaggggaaggtgaaggagctgagtgagcggctggaggatgaggaggaggtgaacgctgacctggccgcccgccggcgcaagctggaggacgagtgcacggagctcaagaaggacattgatgacctgaagctgacactggccaaagctgagaaggagaagcaagccactgagaacaaggtgaagaacctgacggaagagatggctgcgctggacgagtcagtggcccggctgaccaaggagaagaaggcgttgcaggaggcccaccaacaggccctgggtgacctgcaggccgaggaggaccgtgtgagcgcgctgaccaaggccaagctccggctggagcaacaggtggaggacctggaatgctccctggagcaggagaagaagctgcgcatggacacggagcgggccaagcgcaagctggagggtgacctgaagctgacgcaggagtcggtggctgatgctgctcaagacaagcagcagctggaggagaagctcaagaagaaggactccgagctgagccagctgagcctgcgggtggaagacgagcagctcttgggggcccagatgcagaagaagatcaaggagctgcaggctcgggcggaggagctggaagaggagctggaggcagagcgggcagcccgggcccgcgtggagaagcagcgtgcagaggcggcgcgggagctggaggagctgagcgagcggctggaggaggcaggcggcgcatccgcggggcagcgcgagggctgccgcaagcgggaggcggagctggggaggctgcggcgggagctggaggaggcggcgctgcggcacgaggccacagtggcggcactgcggcgcaagcaggcggagggcgcggcggagctgggggagcaggtggacagcctgcagcgggtgcggcagaagctggagaaggagaagagtgagctgcgcatggaggtggacgacctggctgccaacgtggagactctgacccgcgccaaggccagtgcagagaagctgtgccggacctatgaggatcagctaagcgaggccaagatcaaggtggaggagctgcagcggcagctggcggacgcaagcacgcagcgtgggcgactacagacggaaagcggggagctgagtcgcctgctagaggagaaggagtgtctgatcagtcagctgagccgtggaaaggccctggccgcccaaagcctggaagagttgcggcgccagctagaggaggaaagcaaggccaagagtgccctggcccacgccgtgcaggctctgcggcacgactgtgacctcctgcgggagcaacacgaggaggaggctgaggcccaggctgagctgcagcggctgctgtccaaggccaatgccgaggtggcccagtggaggagcaagtacgaagcagatgccatccagaggaccgaggagctggaggaggccaaaaaaaagctggcactgcggctgcaggaggcagaggagggcgtggaggctgccaacgccaagtgctcatcgttggagaaggccaagctgcggctacagacagagtcagaggatgtaaccctggagctggagcgggcgacctcagcagctgctgcgctggacaagaagcagcggcacttggaacgggcactggaggaacggcggcggcaggaggaggagatgcagcgggagctggaggcggcacagagggagtcccgtggcctgggcaccgagctcttccggctgcggcacggccacgaggaggcacttgaagccctggagacgctcaagcgggagaacaagaacctgcaggaggagatcagcgacctcacagaccaggtgagtctcagtgggaagagcatccaggaactggagaaaaccaagaaggcgctggaaggcgagaagagtgagatccaggctgcactggaggaggcagagggggccctggagctggaggagaccaagacgctgcggatccagctggagctctcccaggtcaaagcagaagtggaccggaagctggcagagaaagacgaggagtgcgctaacctgaggcgcaaccaccagcgagctgtggagtccctgcaggcctccctggatgcagagacacgggcccgcaatgaggcgctgcggctcaagaagaagatggagggtgacctcaacgacctggagctgcagctgggccatgccacccgtcaggccacagaggcccaggctgccacgcggctgatgcaggcacagctcaaggaggagcaggcagggcgggacgaggagcagcggctggcagctgagctccacgagcaggcgcaggctctggagcgccgggcctcgctgctggctgcggagctggaggagctgcgggctgccctggagcagggcgagcgcagccggcgactggcagagcaggagcttttggaggccaccgagcgcctcaaccttctgcattcgcagaacacaggcctcctaaaccagaagaagaagctggaggcggacttggcccagctgagcggggaggtggaggaggctgcacaggagaggcgggaggctgaggagaaggccaaaaaggccatcactgatgcggccatgatggccgaggagctgaagaaggagcaggacacaagtgcacacctggaacggatgaagaagacgctggagcagacggtgcgcgagctccaggcccgccttgaggaggcagaacaggccgccctccgtggcgggaagaagcaggtgcagaagctggaggccaaggtacgggagctggaggctgagcttgatgcagagcagaagaagcacgccgaggcccttaagggcgtgcgcaagcatgagcgccgtgtcaaggagctcgcataccaggccgaggaggacaggaagaacctggctcgcatgcaggacctggtggacaagctgcagagcaaggtcaagagctacaagcgccagtttgaggaggcggagcagcaggccaacaccaacctggccaagtatcgcaaggcccagcacgagctggatgatgcggaggagcgggcagacatggcggaaacccaggccaacaagctgcgggcacggacccgggacgccctgggccccaagcacaaggagtgacggcctgaccccctgggctctaaagaggaatgtctgctgttgcacatctggctgaggccacctgccccgatcctgccatctctgcatcgccccctgctgccttcagccttccctgggccctgaataaacaccacagccagtttccttctcattcttttctttggggttcaggaggaaaaacacagtcctagggacaaaagccaggtccacagcagtcatttttaaaataaagttatttaatagtc

SEQ ID NO: 414 - DNA, 2604 bp, Homo sapiens; identical to SEQ ID NO: 205

SEQ ID NO: 415 - DNA, 579 bp, Homo sapiens
ttagccaaacaccttcctgacaccatgagggccagcagcttcttgatcgtggtggtgttcctcatcgctgggacgctggttctagaggcagctgtcacgggagttcctgttaaaggtcaagacactgtcaaaggccgtgttccattcaatggacaagatcccgttaaaggacaagtttcagttaaaggtcaagataaagtcaaagcgcaagagccagtcaaaggtccagtctccactaagcctggctcctgccccattatcttgatccggtgcgccatgttgaatccccctaaccgctgcttgaaagatactgactgcccaggaatcaagaagtgctgtgaaggctcttgcgggatggcctgtttcgttccccagtgagagggagccggtccttgctgcacctgtgccgtccccagagctacaggccccatctggtcctaagtccctgctgcccttccccttcccacactgtccattcttcctcccattcaggatgcccacggctggagctgcctctctcatccactttccaataaagagttccttctgctccaaaaaaaaaaaaaaaaaaaaaaaaaa

SEQ ID NO: 416 - DNA, 1403 bp, Homo sapiens
agttacctctcccctttcacgtagttttcatttgtggtgagattctctcccaggccacaagacatttcctgctcggaaccttgtttactaatttccactgcttttaaggccctgcactgaaaatgcaagctcaggcgccggtggtcgttgtgacccaacctggagtcggtcccggtccggccccccagaactccaactggcagacaggcatgtgtgactgtttcagcgactgcggagtctgtctctgtggcacattttgtttcccgtgccttgggtgtcaagttgcagctgatatgaatgaatgctgtctgtgtggaacaagcgtcgcaatgaggactctctacaggacccgatatggcatccctggatctatttgtgatgactatatggcaactctttgctgtcctcattgtactctttgccaaatcaagagagatatcaacagaaggagagccatgcgtactttctaaaaactgatggtgaaaagctcttaccgaagcaacaaaattcagcagacacctcttcagcttgagttcttcaccatcttttgcaactgaaatatgatggatatgcttaagtacaactgatggcatgaaaaaaatcaaatttttgatttattataaatgaatgttgtccctgaacttagctaaatggtgcaacttagtttctccttgctttcatattatcgaattcgaatttcctggcttataaactttttaaattacatttgaaatataaaccaaatgaaatattttactgataagattcttcatgcttctttgctctccttaaaatgtctttttcactagttagttccaagggtcagtctcataattttgttcttatactttgatttcctttttctttttttttttttttaatagagttgggggatctttctttctttttttttttttttttttgagatagagtctcgctctgttgcccaggctggagtgcagtggcgtgatctcagctcactgcaacctccacctcctggatacaagcgattctgctgcctcagtctcccgagtagctgggattacaggttcccgccaccatgcccagctaatttttgtatttttagtagagacggggtttcaccatcttggtcaggctggtctcgaactcctgacctcgtgatccacctgcctcggcatcacaaaatgctgggattacaggcatgagccaccgcgtccagcctagagttgggggtctttctatgttgcccaggctggtcttgaactccgggcctctagcaagcctctcatctcagcctcccaaggtgctggaattacaggtgtgagccactgcaccatactttggtttcttagcaggagattttggttcacagtaacccagctctctttcatctaagaactttagatgagaaaaaaaaaaaa

SEQ ID NO: 417 - DNA, 1505 bp, Homo sapiens
gaattccgggcgcctggagccacacagggatccggagcctgggggaaaagcggcgcgggagccggcacccaccgctggaggggcggcgacggcggccgtagcgacctcgggaggcaagcggagccgccatggccgagttcccgtcgaaagttagcacgcggaccagcagtcctgcgcagggcgccgaagcctcggtgtcggcgctgcgcccggacctgggcttcgtgcgctcccgcctcggggcgctcatgctgctgcagctggtgctggggctgctggtgtgggcgctgattgcggacaccccgtaccacctgtatccggcctatggctgggtgatgttcgtcgctgtcttcctctggctggtgacaatcgtcctcttcaacctctacctgtttcagctgcacatgaagttgtacatggttccctggccactggtgttaatgatctttaacatcagcgccaccgttctctacatcaccgccttcatcgcctgctctgcggcagttgacctgacatccctgaggggcacccggccttataaccagcgcgcggctgcctcgttctttgcgtgtttggtgatgatcgcctatggagtgagtgccttcttcagctaccaggcctggcgaggagtaggcagcaatgcggccaccagtcagatggctggcggctatgcctaaaccacctgtgccacggccccctctggggctgaagccgccgctgggtcacagagcagggtcaccctgcaagcctgaagctggggagccctgcgtggagtcagcccaacagggactgcatttgctcctctctgcccgtcagacataagctctcacagcgctaaggaagcaggcccaggctggcaggcatctcggcttgcaggaggccaactgctgagacctcttctccatcccccttattcagtggaagatgacgggggatctgaggctgtgtctctgccttgtctttagaggacttcagcgtccaagactggggcccacccttctcaccagcactaaatgcactaacaaggactccagacctgcagccccagacccgccgtagtataagcctaacaagcaacacgtagcaccttagtctttgttccaggagagctgagcaagctggtgaaaccactctccttcctttaaacaccgtttcaaccaacctctccctggagccaacctgtaaaaagtgggttgattgctgacagcatggtcttccctccctgcatttcagacataccagttactgaaagcaaatcagttttaagtgatttctcagtgctgaaaagcctgtccaggtttccttccctttcccaagcctctctctgtaatactccctttgggcgaagctaacatcggtgcctccccgaccttgctgactaggcacatgggacgcaaaggagggagggaagcaaggccttgcctggcgagttgtcatgtggttggtggtgactgttttattttttttaataaaaataaagatgagagaaattaaaaaaaaaccgg

SEQ ID NO: 418 - DNA, 1391 bp, Homo sapiens
acacaccctgacccgcatcgccctgggtctctcgagcctgctgcctgctcccccgccccaccagccatggtggtttctggagcgcccccagccctgggtgggggctgtctcggcaccttcacctccctgctgctgctggcgtcgacagccatcctcaatgcggccaggatacctgttcccccagcctgtgggaagccccagcagctgaaccgggttgtgggcggcgaggacagcactgacagcgagtggccctggatcgtgagcatccagaagaatgggacccaccactgcgcaggttctctgctcaccagccgctgggtgatcactgctgcccactgtttcaaggacaacctgaacaaaccatacctgttctctgtgctgctgggggcctggcagctggggaaccctggctctcggtcccagaaggtgggtgttgcctgggtggagccccaccctgtgtattcctggaaggaaggtgcctgtgcagacattgccctggtgcgtctcgagcgctccatacagttctcagagcgggtcctgcccatctgcctacctgatgcctctatccacctccctccaaacacccactgctggatctcaggctgggggagcatccaagatggagttcccttgccccaccctcagaccctgcagaagctgaaggttcctatcatcgactcggaagtctgcagccatctgtactggcggggagcaggacagggacccatcactgaggacatgctgtgtgccggctacttggagggggagcgggatgcttgtctgggcgactccgggggccccctcatgtgccaggtggacggcgcctggctgctggccggcatcatcagctggggcgagggctgtgccgagcgcaacaggcccggggtctacatcagcctctctgcgcaccgctcctgggtggagaagatcgtgcaaggggtgcagctccgcgggcgcgctcaggggggtggggccctcagggcaccgagccagggctctggggccgccgcgcgctcctagggcgcagcgggacgcggggctcggatctgaaaggcggccagatccacatctggatctggatctgcggcggcctcgggcggtttcccccgccgtaaataggctcatctacctctacctctgggggcccggacggctgctgcggaaaggaaaccccctccccgacccgcccgacggcctcaggccccgcctccaaggcatcaggccccgcccaacggcctcatgtccccgcccccacgacttccggccccgccccgggccccagcgcttttgtgtatataaatgttaatgatttttataggtatttgtaaccctgcccacatatcttatttattcctccaatttcaataaattatttattctccagtgaaaaa

SEQ ID NO: 419 - DNA, 5506 bp, Homo sapiens
gtgtgaatgcttcattcgcctcacaaacaaccacagaaccacaagtgcggtgcaaactttctccaggaggacagcaagaagtctctggtttttaaatggttaatctccgcaggtcactaccagccaccgagaccaacagagtcatttaaggctgcaagcagtatttacaacagagggtacaagttctatctgaaaaaaaaaggagggactatggcatcaaacagcctcttcagcacagtgacaccatgtcagcaaaacttcttttgggatccgagcaccagccggcgcttcagccccccctccagcagcctgcagcccggcaaaatgagcgacgtgagcccggtggtggctgcgcaacagcagcagcaacagcagcagcagcaacagcagcagcagcagcagcaacagcagcagcagcagcaggaggcggcggcggcggctgcggcggcggcggcggctgcggcggcggcagctgcagtgccccggttgcggccgccccacgacaaccgcaccatggtggagatcatcgccgaccacccggccgaactcgtccgcaccgacagccccaacttcctgtgctcggtgctgccctcgcactggcgctgcaacaagaccctgcccgtggccttcaaggtggtagccctcggagaggtaccagatgggactgtggttactgtcatggcgggtaacgatgaaaattattctgctgagctccggaatgcctctgctgttatgaaaaaccaagtagcaaggttcaacgatctgagatttgtgggccggagtggacgaggcaagagtttcaccttgaccataaccgtcttcacaaatcctccccaagtagctacctatcacagagcaattaaagttacagtagatggacctcgggaacccagaaggcacagacagaagcttgatgactctaaacctagtttgttctctgaccgcctcagtgatttagggcgcattcctcatcccagtatgagagtaggtgtcccgcctcagaacccacggccctccctgaactctgcaccaagtccttttaatccacaaggacagagtcagattacagaccccaggcaggcacagtcttccccgccgtggtcctatgaccagtcttacccctcctacctgagccagatgacgtccccgtccatccactctaccaccccgctgtcttccacacggggcactgggcttcctgccatcaccgatgtgcctaggcgcatttcaggtgcttcagaactgggccctttttcagaccccaggcagttcccaagcatttcatccctcactgagagccgcttctccaacccacgaatgcactatccagccacctttacttacaccccgccagtcacctcaggcatgtccctcggtatgtccgccaccactcactaccacacctacctgccaccaccctaccccggctcttcccaaagccagagtggacccttccagaccagcagcactccatatctctactatggcacttcgtcaggatcctatcagtttcccatggtgccggggggagaccggtctccttccagaatgcttccgccatgcaccaccacctcgaatggcagcacgctattaaatccaaatttgcctaaccagaatgatggtgttgacgctgatggaagccacagcagttccccaactgttttgaattctagtggcagaatggatgaatctgtttggcgaccatattgaaattcctcagcagtggcccagtggtatctgggggccacatcccacacgtatcaatatatacatatatagagagagtgcatatatatgtatatcgattagctatctacaaagtgcctattttttagaagatttttcattcactcactcagtcatgatcttgcagccataagagggtagatattgagaagcagaaggctcaagagagacaattgcaatcgagcttcagattgtttactatttaagatgtacttttacaaaggaacaaagaagggaaaaggtatttttgtttttgttgtttggtctgttatcatcaataacctgttcatatgccaattcagagaggtggactccaggttcaggagggagaagagcaaagccgcttcctctctgtgctttgaaacttcacaccctcacggtggcagctgtgtatggaccagtgccctccgcagacagctcacaaaaccagttgaggtgcactaaagggacatgaggtagaatggatgcttccatcacagtaccatcattcagaataactcttccaatttctgctttcagacatgctgcaggtcctcatctgaactgttgggttcgtttttttttttttttttcctgctccaagaaagtgacttcaaaaataactgatcaggatagattattttattttactttttaacactccttctccccttttcccactgaaccaaaaagaaatcccatccctaaaacctgccttctccttttatgcaaaactgaaaatggcaatacattattatagccataatggtatagatagtgattgcgtttggctatgtgttgttttctttttttttaaattatgaatatgtgtaaaatctgaggtaacttgctaacgtgaatggtcatataactttaaagatatatttataattatttaatgacatttggacccttgaaacatttcttagtgtattgatatgttgacttcggtctctaaaagtgctctttattaaataacaaatttcttcagtggtctagagccatatctgaaatattgctaagcaatttcagttcatccaggcacaatgtgattttaaaaaatacttccatctccaaatattttagatatagattgtttttgtgatgtatgaaggaaatgttatgtttagttctttcagatctttgaatgcctctaacacagctttgccttctaaagcggtaattagggatttaaaaaacaacctttagccctttatcagcatgaaatgctggagtgatgtggttttctaatttctttggggtaattatgactcttgtcatattaaaaagacaagcacaagtaaatcattgaactacagaaaaatgttctgtggtttcatagttaagcaaaactctaaatcgccaggcttcatagcaaagacatagtcagctaaaagccgcacatgtggatagagggttcaattatgagacacctagtacaggagagcaaaattgcaccagagattcttaaccaaccagccttaccaaacaacacaacaggggaaccccaatctgccttacccaaggccccactggcagctttccacagaatttgcatttagaggagcagaatgacatcactgtcctttgggagtaggtcctctgaaaaggcagcaggttccagcaggtagctgagctgagaggacatatggcccacggggacctacagacagcctttgacatttgtatttcttacaatggagggccaaggagggcaaggggctgtggagtttggtgtctactagtgtgtatgaatttgagctagagtccttctgtggcatgcactttgaccactcctggcagtcacatggcagatttccaagtgcaaatccttaatccaaacaaggatcatctaatgacaccaccaggccaatccctgctctcctccccgaaaagtcagggtcccttcattggaatcctccacccacccaagcagaatttagcagagatttgccttcaaaccctaacggcccccttgttctctggtccttctcaaacccacctttgtaggccacccagcattgcaggacagcgtgtggggcagctggacctgtgcttcctgcctgggagtctcccttggaattcatcctgactccttctaataaaaatggatgggaaagcaaaacactttgccttctaaaggccgtataccaagtatgcttagataaataagccacttttctattacttaagtaagaaggaagtagtaattgatactatttattgtttgtgtgtggtagcttgaagcacaccactgtccatttatttgtaagtgtaaaatatgtgtgtttgtttcagcagcacttaaaaaagccagtgtctggttacacatttcaattttaattaattgacataaaaatgctaccgccagtgccagctgcatcctatttaattaaaaaggtactatatttgtacattattttttaatgttaaaagggcttttttaagtttacagtacacataccgagtgactttagggatgcttttgtgttgaaatgttactatagtggctgcaggcagcaacccagaaacactttagaagctttttttccttgggaaaaattcaagcacttcttccctccaccctcactccaaccaccccaatgggggtaattcacatttcttagaacaaattctgcccttttttggtctagggattaaaattttgtttttctttctttctttttttttttttttcactgaacccttaatttgcactgggtcatgtgtttgatttgtgatttcaagaccaaagcaaagtcttactactactgtggaaccatgtactagttcctgggaattaaaatagcgtggttctctttgtagcacaaacattgctggaatttgcagtcttttcaatgcagccacatttttatccatttcagttgtctcacaaattttaacccatatcagagttccagaacaggtaccacagctttggttttagattagtggaataacattcagcccagaactgagaaactcaacagattaactatcgtttgctctttagacggtctcactgcctctcacttgccagagccctttcaaaatgagcagagaagtccacaccattagggaccatctgtgataaattcagaagggaggagatgtgtgtacagctttaaggattccctcaattccgaggaaagggactggcccagaatccaggttaatacatggaaacacgaagcattagcaaaagtaataattatacctatggtatttgaaagaacaataataaaagacacttcttccaaaccttgaatttgttgtttttagaaaacgaatgcatttaaaaatattttctatgtgagaattttttagatgtgtgtttacttcatgtttacaaataactgtttgctttttaatgcagtactttgaaatatatcagccaaaaccataacttacaataatttcttaggtattctgaataaaattccatttcttttggatatgctttaccattcttaggtttctgtggaacaaaaatatttgtagcattttgtgtaaatacaagctttcatttttattttttccaattgctattgcccaagaattgctttccatgcacatattgtaaaaattccgctttgtgccacaggtcatgattgtggatgagtttactcttaacttcaaagggactatttgtattgtatgttgcaactgtaaattgaattatttggcatttttctcatgattgtaatattaatttgaagtttgaatttaattttcaataaaatggcttttttggttttgttaaaaaaaaaaaaaaaaaaaa

SEQ ID NO: 420 - DNA, 3030 bp, Homo sapiens
gggagctggagccgagcgccgccgccgaagcttccgtctcgctcgctcgcgcagcggcggcagcagaggtcgcgcacagatgcgggttagactggcggggggaggaggcggaggagggaaggaagctgcatgcatgagacccacagactcttgcaagctggatgccctctgtggatgaaagatgtatcatggaatgaacccgagcaatggagatggatttctagagcagcagcagcagcagcagcaacctcagtccccccagagactcttggccgtgatcctgtggtttcagctggcgctgtgcttcggccctgcacagctcacgggcgggttcgatgaccttcaagtgtgtgctgaccccggcattcccgagaatggcttcaggacccccagcggaggggttttctttgaaggctctgtagcccgatttcactgccaagacggattcaagctgaagggcgctacaaagagactgtgtttgaagcattttaatggaaccctaggctggatcccaagtgataattccatctgtgtgcaagaagattgccgtatccctcaaatcgaagatgctgagattcataacaagacatatagacatggagagaagctaatcatcacttgtcatgaaggattcaagatccggtaccccgacctacacaatatggtttcattatgtcgcgatgatggaacgtggaataatctgcccatctgtcaaggctgcctgagacctctagcctcttctaatggctatgtaaacatctctgagctccagacctccttcccggtggggactgtgatctcctatcgctgctttcccggatttaaacttgatgggtctgcgtatcttgagtgcttacaaaaccttatctggtcgtccagcccaccccggtgccttgctctggaagtctgtccactacctccaatggtgagtcacggagatttcgtctgccacccgcggccttgtgagcgctacaaccacggaactgtggtggagttttactgcgatcctggctacagcctcaccagcgactacaagtacatcacctgccagtatggagagtggtttccttcttatcaagtctactgcatcaaatcagagcaaacgtggcccagcacccatgagaccctcctgaccacgtggaagattgtggcgttcacggcaaccagtgtgctgctggtgctgctgctcgtcatcctggccaggatgttccagaccaagttcaaggcccactttccccccagggggcctccccggagttccagcagtgaccctgactttgtggtggtagacggcgtgcccgtcatgctcccgtcctatgacgaagctgtgagtggcggcttgagtgccttaggccccgggtacatggcctctgtgggccagggctgccccttacccgtggacgaccagagccccccagcataccccggctcaggggacacggacacaggcccaggggagtcagaaacctgtgacagcgtctcaggctcttctgagctgctccaaagtctgtattcacctcccaggtgccaagagagcacccaccctgcttcggacaaccctgacataattgccagcacggcagaggaggtggcatccaccagcccaggcatcgacattgcagatgagattcctctaatggaagaagatccctaatatgggtcaagatccagatgactctcctgctccttcggggaaaggaccttgtatcttggagtgaggtcacagaaggatagagcctgggggcaaaatgtctaacttgtctacatggggaccacagttcacattatgcatctcaggctccacagtgaggctgacaaactgcaatggcagtgcttttaaatgagatttgaggattcaccaagacccatggggaaccggggcagcagggaagccctcgcgtggtcttggatgaggggtgttaaatgtgtatcgtgctgtggaacatgggacaattccacgcacatcccaccgaatcatcacgcatcccattgactggcaagtactccccgccccctctgaaagcatgtcacatcatgtaaatttgcttctaacatctgcttcaaactgtctctggactccaaatttggatgggtcagcctctgcagaaagtttgtgttgagatgctggaagaacagcagagcctcctgcaccctcagcaagggaccagctcccaaaggaaaggtccttgtgtgacatttggagaatcttccttcatccagacaactctactcgaagcaagacgaaagcaggatgtggcagttgcagtgagaaaggaaaggaaagatgggcagactctgctttctggaaatttcttcacaaagtagagctcatgaactctgtgctgtcttctggtaacatatcatcagtgtttgtattcatggtgtggcacatggatccatggcattgggtaaatctggtggtttttacacatggtcagaatgtgttcaaatacatctcatgatggagacagtaaccaaggtaatgttttgtttcagcattttaaaaagactccacttaacatttatctcagaatcatgagcctctctctagttgacaattgtcattgttcccccagccccaaattgaaccatacatttattttccaaaacagaaattgtttctgtaaacatatccgaccttcaaaagaagtgtgaggttggatttttcccccttttatttgtcctaagattccaggaggctggcctcccagcccagatagctcagccacctcacctgcctatcattcctgcattcctactttgagggtctcatcatgcccactgggtgttgttcctaagaaactgattgattaaaaaatttcccaaagtgtcctgaagtgtctcttcaaatacatgttgatctgtggagttgattcctttccttctcttggttttagacaaatgtaaacaaagctctgatccttaaaattgctatgctgatagagtggtgagggctggaagcttgatcaagtcctgtttcttcttgacacagactgattaaaaattaaaagaaaatgacagtttgaaaaa

SEQ ID NO: 421 - DNA, 2070 bp, Homo sapiens
tccccgccccgactggggtttgttgttgaagaaggagaatccccggaaaggctgagtctccagctcaaggtcaaaacgtccaaggccgaaagccctccagtttcccctggacgccttgctcctgcttctgctacgaccttctggggaaaacgaatttctcattttcttcttaaattgccattttcgctttaggagatgaatgttttcctttggctgttttggcaatgactctgaattaaagcgatgctaacgcctcttttccccctaattgttaaaagctatggactgcaggaagatggcccgcttctcttacagtgtgatttggatcatggccatttctaaagtctttgaactgggattagttgccgggctgggccatcaggaatttgctcgtccatctcggggatacctggccttcagagatgacagcatttggccccaggaggagcctgcaattcggcctcggtcttcccagcgtgtgccgcccatggggatacagcacagtaaggagctaaacagaacctgctgcctgaatgggggaacctgcatgctggggtccttttgtgcctgccctccctccttctacggacggaactgtgagcacgatgtgcgcaaagagaactgtgggtctgtgccccatgacacctggctgcccaagaagtgttccctgtgtaaatgctggcacggtcagctccgctgctttcctcaggcatttctacccggctgtgatggccttgtgatggatgagcacctcgtggcttccaggactccagaactaccaccgtctgcacgtactaccacttttatgctagttggcatctgcctttctatacaaagctactattaatcgacattgacctatttccagaaatacaattttagatatcatgcaaatttcatgaccagtaaaggctgctgctacaatgtcctaactgaaagatgatcatttgtagttgccttaaaataatgaatacatttccaaaatggtctctaacatttccttacagaactacttcttacttctttgccctgccctctcccaaaaaactacttcttttttcaaaagaaagtcagccatatctccattgtgcctaagtccagtgtttctttttttttttttttttgagacggagtctcactctgtcacccaggctggactgcaatgacgcgatcttggttcactgcaacctccgcatccggggttcaagccattctcctgcctcagcctcccaagtaactgggattacaggcatgtgtcaccatgcccagctaatttttttgtatttttagtagagatgggggtttcaccatattggccagtctggtctcgaactcctgaccttgtgatccactcgcctcagcctctcgaagtgctgagattacacacgtgagcaactgtgcaaggcctggtgtttcttgatacatgtaattctaccaaggtcttcttaatatgttcttttaaatgattgaattatatgttcagattattggagactaattctaatgtggaccttagaatacagttttgagtagagttgatcaaaatcaattaaaatagtctctttaaaaggaaagaaaacatctttaaggggaggaaccagagtgctgaaggaatggaagtccatctgcgtgtgtgcagggagactgggtaggaaagaggaagcaaatagaagagagaggttgaaaaacaaaatgggttacttgattggtgattaggtggtggtagagaagcaagtaaaaaggctaaatggaagggcaagtttccatcatctatagaaagctatataagacaagaactcccctttttttcccaaaggcattataaaaagaatgaagcctccttagaaaaaaaattatacctcaatgtccccaacaagattgcttaataaattgtgtttcctccaagctattcaattcttttaactgttgtagaagacaaaatgttcacaatatatttagttgtaaaccaagtgatcaaactacatattgtaaagcccatttttaaaatacattgtatatatgtgtatgcacagtaaaaatggaaactatattgacctaaaaaaaaaaaaa

SEQ ID NO: 422 - DNA, 717 bp, Homo sapiens
cacggtggaagggctggggccacggggcagagaagaaaggttatctctgcttgttggacaaacagaggggagattataaaacatacccggcagtggacaccatgcattctgcaagccaccctggggtgcagctgagctagacatgggacggcgagacgcccagctcctggcagcgctcctcgtcctggggctatgtgccctggcggggagtgagaaaccctccccctgccagtgctccaggctgagcccccataacaggacgaactgcggcttccctggaatcaccagtgaccagtgttttgacaatggatgctgtttcgactccagtgtcactggggtcccctggtgtttccaccccctcccaaagcaagagtcggatcagtgcgtcatggaggtctcagaccgaagaaactgtggctacccgggcatcagccccgaggaatgcgcctctcggaagtgctgcttctccaacttcatctttgaagtgccctggtgcttcttcccgaagtctgtggaagactgccattactaagagaggctggttccagaggatgcatctggctcaccgggtgttccgaaaccaaagaagaaacttcgccttatcagcttcatacttcatgaaatcctgggttttcttaaccatcttttcctcattttcaatggtttaacatataatttctttaaataaaacccttaaaatctgctaaaaaaaaaaaa

SEQ ID NO: 423 - DNA, 4283 bp, Homo sapiens
gggagggtaactacctgctgaaagtgaactttctttgatatccatgcatatatataaactcagccctgcctttgatgttcagcaactgattcactgatcagattacaggcatttcatctccctgctcgtctgcctttgatctgcatggttaattttattttcctggatttgaagtttcgtctgggcttgtgctgacatacatttttgggaaggtagaagcatttggcacagaagtgctgccaggagaaactaagttgctgaacggaactctccaacaataaatacatttgataagaaagatggctttaaaagtgctactagaacaagagaaaacgtttttcactcttttagtattactaggctatttgtcatgtaaagtgacttgtgaatcaggagactgtagacagcaagaattcagggatcggtctggaaactgtgttccctgcaaccagtgtgggccaggcatggagttgtctaaggaatgtggcttcggctatggggaggatgcacagtgtgtgacgtgccggctgcacaggttcaaggaggactggggcttccagaaatgcaagccctgtctggactgcgcagtggtgaaccgctttcagaaggcaaattgttcagccaccagtgatgccatctgcggggactgcttgccaggattttataggaagacgaaacttgtcggctttcaagacatggagtgtgtgccttgtggagaccctcctcctccttacgaaccgcactgtgccagcaaggtcaacctcgtgaagatcgcgtccacggcctccagcccacgggacacggcgctggctgccgttatctgcagcgctctggccaccgtcctgctggccctgctcatcctctgtgtcatctattgtaagagacagtttatggagaagaaacccagctggtctctgcggtcacaggacattcagtacaacggctctgagctgtcgtgttttgacagacctcagctccacgaatatgcccacagagcctgctgccagtgccgccgtgactcagtgcagacctgcgggccggtgcgcttgctcccatccatgtgctgtgaggaggcctgcagccccaacccggcgactcttggttgtggggtgcattctgcagccagtcttcaggcaagaaacgcaggcccagccggggagatggtgccgactttcttcggatccctcacgcagtccatctgtggcgagttttcagatgcctggcctctgatgcagaatcccatgggtggtgacaacatctctttttgtgactcttatcctgaactcactggagaagacattcattctctcaatccagaacttgaaagctcaacgtctttggattcaaatagcagtcaagatttggttggtggggctgttccagtccagtctcattctgaaaactttacagcagctactgatttatctagatataacaacacactggtagaatcagcatcaactcaggatgcactaactatgagaagccagctagatcaggagagtggtgctgtcatccacccagccactcagacgtccctccaggaagcttaaagaacctgcttctttctgcagtagaagcgtgtgctggaacccaaagagtactcctttgttaggcttatggactgagcagtctggaccttgcatggcttctggggcaaaaataaatctgaaccaaactgacggcatttgaagcctttcagccagttgcttctgagccagaccagctgtaagctgaaacctcaatgaataacaagaaaagactccaggccgactcatgatactctgcatctttcctacatgagaagcttctctgccacaaaagtgacttcaaagacggatgggttgagctggcagcctatgagattgtggacatataacaagaaacagaaatgccctcatgcttattttcatggtgattgtggttttacaagactgaagacccagagtatactttttctttccagaaataatttcataccgcctatgaaatatcagataaattaccttagcttttatgtagaatgggttcaaaagtgagtgtttctatttgagaaggacactttttcatcatctaaactgattcgcataggtggttagaatggccctcatattgcctgcctaaatcttgggtttattagatgaagtttactgaatcagaggaatcagacagaggaggatagctctttccagaatccacacttctgacctcagcctcggtctcatgaacacccgctgatctcaggagaacacctgggctagggaatgtggtcgagaaagggcagcccattgcccagaattaacacatattgtagagacttgtatgcaaaggttggcatatttatatgaaaattagttgctatagaaacatttgttgcatctgtccctctgcctgagcttagaaggttatagaaaaagggtatttataaacataaatgaccttttacttgcattgtatcttatactaaaggctttagaaattacaacatatcaggttcccctactactgaagtagccttccgtgagaacacaccacatgttaggactagaagaaaatgcacaatttgtaggggtttggatgaagcagctgtaactgccctagtgtagtttgaccaggacattgtcgtgctccttccaattgtgtaagattagttagcacatcatctcctactttagccatccggtgttggatttaagaggacggtgcttctttctattaaagtgctccatcccctaccatctacacattagcattgtctctagagctaagacagaaattaaccccgttcagtcacaaagcagggaatggttcatttactcttaatctttatgccctggagaagacctacttgaacagggcatattttttagacttctgaacatcagtatgttcgagggtactatgatattttggtttggaattgccctgcccaagtcactgtcttttaacttttaaactgaatattaaaatgtatctgtctttcctagtatgtttttatcttctcatgtattatccatggttttctctgtttgtgacagattagtaaaatttaatgagccctctttcttgtggccgtttctccatagttttaggttttgatatgtgtttactagcttgcctgtgtctggtacatctcatgacctcaattccctcacctgaaataggaaatgagaatgtttcattgtagccccaagcggtcatgtcaacctagtgcctagtcataattaattgacttttcctgtattacttctttttttaagtataaaccaatgatcctttggtagtcaagaactcttaggaacattgccttttggacatgtaaaatatttaggatttgaccacacaatggctatgaaaatgcaagtagtttcctcgcgtgacctcaccatgattcacatacgtgccactgtttgaaatctggtctgtttgcatttctgttatgacagagagatgatgtttgcatttctgttatgacagagagatgatgaaagtaggcagggctgtgttcctttgtgtagcctgtatatattttccatatgtagagccctgattaacttcaaggacaaacactggctggagaaagccagactgatgggaatgagactttggccaaaaatcccaaaacatcattttcaatcagtagagaagtgcttagggttgaaaattgatttcatttgctactgaatttggtaaatcctgggtaacttttatcaagatgaagacattttaccctacctactctagaaatatacaacaatgttatattttacactccttggaaacatttgaggaaaaaaatgcaatttgcacttcactttgttggaatatcccatagcactcaataaactcagctgctagagtgccgatgtcaggagggctgtgtcgggtaatgcgtgtggctgaatgggcataaccactgtggcttcttgtgctgcagaagctcgttgacaagactgaggaggatttcaagagcaaccaagtaaagtcatgaattttctaattttgtgtatatggaatatatttttaaatagagatttttctactttagataatgtgttaatattgctattacctaggttaagcactattgtctgtgctagtaagaaaaagaaaggaaaaccatcattgctttatagtagcttatatcaatttagatttcatcattactattttgcatactggaatttataaatgtgtaaattatcattttcttagttttgtaataccttttttatttgtgaataaaattatcacctggtattcttaaaaaaaaaaaaaaaaaa

SEQ ID NO: 424 - DNA, 1297 bp, Homo sapiens
gtgagagccaggcgtccctctgcctgcccactcagtggcaacacccgggagctgttttgtcctttgtggagcctcagcagttccctctttcagaactcactgccaagagccctgaacaggagccaccatgcagtgcttcagcttcattaagaccatgatgatcctcttcaatttgctcatctttctgtgtggtgcagccctgttggcagtgggcatctgggtgtcaatcgatggggcatcctttctgaagatcttcgggccactgtcgtccagtgccatgcagtttgtcaacgtgggctacttcctcatcgcagccggcgttgtggtctttgctcttggtttcctgggctgctatggtgctaagactgagagcaagtgtgccctcgtgacgttcttcttcatcctcctcctcatcttcattgctgaggttgcagctgctgtggtcgccttggtgtacaccacaatggctgagcacttcctgacgttgctggtagtgcctgccatcaagaaagattatggttcccaggaagacttcactcaagtgtggaacaccaccatgaaagggctcaagtgctgtggcttcaccaactatacggattttgaggactcaccctacttcaaagagaacagtgcctttcccccattctgttgcaatgacaacgtcaccaacacagccaatgaaacctgcaccaagcaaaaggctcacgaccaaaaagtagagggttgcttcaatcagcttttgtatgacatccgaactaatgcagtcaccgtgggtggtgtggcagctggaattgggggcctcgagctggctgccatgattgtgtccatgtatctgtactgcaatctacaataagtccacttctgcctctgccactactgctgccacatgggaactgtgaagaggcaccctggcaagcagcagtgattgggggaggggacaggatctaacaatgtcacttgggccagaatggacctgccctttctgctccagacttggggctagatagggaccactccttttaggcgatgcctgactttccttccattggtgggtggatgggtggggggcattccagagcctctaaggtagccagttctgttgcccattcccccagtctattaaacccttgatatgccccctaggcctagtggtgatcccagtgctctactgggggatgagagaaaggcattttatagcctgggcataagtgaaatcagcagagcctctgggtggatgtgtagaaggcacttcaaaatgcataaacctgttacaatgttaaaaaaaaaaaaaaaaaaa

SEQ ID NO: 425 - DNA, 2014 bp, Homo sapiens
aggcggcttttggtcacaggctcccgagttctcctagctggggctgcggagctggggggagggaagagaggaaaggggagggggtgcctggagaggcggaggctcgcgcgcctgcgcatccagctccagggaccctaggttttctatgggattcccaatctgcagcagagatttacccgagcgtgttgcggcagcggctgggcttgcaaggcgcgatccaagagggatttaagcagcccagagctccagagaaaaagagagcgagagagaaccacacacagagacggcttaagcgtttacccgaattaaatatatatttttaaaaagaactgttgagttttatcattttcgttaagtgaccgtgcgcagcgctgtaactgcaggatggggaagcagaatagcaaactggcccctgaagtgatggaggacctggtgaagagcacagagtttaatgagcatgaactcaagcagtggtacaaaggatttctcaaggactgtccaagtgggaggctaaatctcgaggaatttcagcagctctatgtgaagttctttccttatggagacgcctccaagtttgcccagcatgccttccgaaccttcgacaagaatggggacggcaccattgacttccgagagttcatctgcgctctgtccatcacctccaggggcagctttgagcagaagctgaactgggccttcaatatgtatgacctggatggtgatggcaagatcacccgagtggagatgctggagatcatcgaggctatctacaaaatggtaggcactgtgatcatgatgaaaatgaatgaggatggcctgacgcctgagcagcgagtagacaagattttcagcaagatggataagaacaaagatgaccagattacactggatgaattcaaagaagctgcaaagagcgacccttccattgtattacttctgcagtgcgacatccagaaatgagctgatgtcaatgctatggactgcacaaaagtctcaatgttccattcagtctgcagctattcacacacacacacacacacacacacacacacacacacacacacacaaatattgcttggactacctataaatggacttgcttcttgtgtttgaaacactcgtgtgcatgagaatgtcatttgctaatgaattttaaaagcatatataaaacaaaacaaacaacctgccacaatgtgatatgtgtaatatcatttcataaaaatccctcttcctccaaagcctgggcagaaatgtgctgcaaagagttatatgacttcttgttcatgttttgctaatgctcgtatctccttgattacataatgttagtagcactgagacccccatggtaatgtaacttaattataagctatgtcactaccctcctgtaaaatactattggacagacacagagggacccttggctcctgtgtctggtccacacaccacagaagcttgtattatcagtgaatataaatgtactacatttgcatgccttttgggtttgccttaattcttacctcatttgcatcctatcgatctggaaagagctgttttggatgaatgcagtataaaatgtaaaaaccctgctaaatgacttattgattaagtatatctatctatatatacatatacacaaagatattatttatcgaaagtaaaaaagatggaagtgtattggtttctgtttgaattttcaaaggcttccaatgtggtggcaataaatgtcccaaataaatttataacaattgattttccccctaattcttattttataattttaaaattgcagcagttgctagcaacaacttactaaatctactcttaaatatacaactttggaatttgaagaattaatgacaacaaaagggaaaaaagcaactttccaacttttcatccaggctcccaaaagagggacaacgaacatggcatgtgaaaagtaaaacagatttgttcattccgaaaaaaaaatgttcattctatgacaataaattttatctcagtgtgaaaaaaaaaa

SEQ ID NO: 426 - DNA, 25 bp, Homo sapiens
atggtcatacgattcttatggaccc

SEQ ID NO: 427 - DNA, 25 bp, Homo sapiens
agaaatcctctagttggtgcctcca

SEQ ID NO: 428 - DNA, 25 bp, Homo sapiens
tgaggcattttcctgcagaatgggc

SEQ ID NO: 429 - DNA, 25 bp, Homo sapiens
cagggttccttcaattggcattttc

SEQ ID NO: 430 - DNA, 25 bp, Homo sapiens
aaggaagggcatccttctgcctttt

SEQ ID NO: 431 - DNA, 25 bp, Homo sapiens
gatgtatgcacctattggacactgt

SEQ ID NO: 432 - DNA, 25 bp, Homo sapiens
aaacgggcttggagctggccccata

SEQ ID NO: 433 - DNA, 25 bp, Homo sapiens
ggttctggctatgtctttgcaccag

SEQ ID NO: 434 - DNA, 25 bp, Homo sapiens
tgtctgccagtcaagcttcacaggc

SEQ ID NO: 435 - DNA, 25 bp, Homo sapiens
gagcctcatctttcgctgtgtattc

SEQ ID NO: 436 - DNA, 25 bp, Homo sapiens
ttatttggtcatgaggcaccttgct

SEQ ID NO: 437 - DNA, 25 bp, Homo sapiens
aggccgcagctctgtataaggtctc

SEQ ID NO: 438 - DNA, 25 bp, Homo sapiens
cacctctgtcgcttgggttaaacaa

SEQ ID NO: 439 - DNA, 25 bp, Homo sapiens
gtaagactcgggattagtacacact

SEQ ID NO: 440 - DNA, 25 bp, Homo sapiens
ctgctctatgacagcgacgccaaga

SEQ ID NO: 441 - DNA, 25 bp, Homo sapiens
gaggtcgtgcgcaggtttgttacat

SEQ ID NO: 442 - DNA, 25 bp, Homo sapiens
accttgtaccactcggtccatgaaa

SEQ ID NO: 443 - DNA, 25 bp, Homo sapiens
atcaggtcgtcaatcttcagatcaa

SEQ ID NO: 444 - DNA, 25 bp, Homo sapiens
tttagtttctttgcgaagcctgctc

SEQ ID NO: 445 - DNA, 25 bp, Homo sapiens
gctgtgcagtgtgatgtgtcccaaa

SEQ ID NO: 446 - DNA, 25 bp, Homo sapiens
tgctcctctaactcacagtgggttt

SEQ ID NO: 447 - DNA, 25 bp, Homo sapiens
cagcgccaggaaatcatgaggttca

SEQ ID NO: 448 - DNA, 25 bp, Homo sapiens
gattgacaagcgcagtcccctgtat

SEQ ID NO: 449 - DNA, 25 bp, Homo sapiens
atgtccttcttgtccacggttttgt

SEQ ID NO: 450 - DNA, 25 bp, Homo sapiens
aggtgctccagccaatttgacgaca

SEQ ID NO: 451 - DNA, 25 bp, Homo sapiens
agcatgagcgccgtgtcaaggagct

SEQ ID NO: 452 - DNA, 25 bp, Homo sapiens
agagaccctcgaaatctccgagaag

SEQ ID NO: 453 - DNA, 25 bp, Homo sapiens
gattggtatggccttagctcttagc

SEQ ID NO: 454 - DNA, 25 bp, Homo sapiens
gtgactgtttcagcgactgcggagt

SEQ ID NO: 455 - DNA, 25 bp, Homo sapiens
gtctctgccttgtctttagaggact

SEQ ID NO: 456 - DNA, 25 bp, Homo sapiens
gagcgggatgcttgtctgggcgact

SEQ ID NO: 457 - DNA, 25 bp, Homo sapiens
tttaaatggttaatctccgcaggtc

SEQ ID NO: 458 - DNA, 25 bp, Homo sapiens
aacaaagctctgatccttaaaattg

SEQ ID NO: 459 - DNA, 25 bp, Homo sapiens
gtggaccttagaatacagttttgag

SEQ ID NO: 460 - DNA, 25 bp, Homo sapiens
ataacaggacgaactgcggcttccc

SEQ ID NO: 461 - DNA, 25 bp, Homo sapiens
cattttaccctacctactctagaaa

SEQ ID NO: 462 - DNA, 25 bp, Homo sapiens
gagggttgcttcaatcagcttttgt

SEQ ID NO: 463 - DNA, 25 bp, Homo sapiens
gacacagagggacccttggctcctg

SEQ ID NO: 464 - DNA, 925 bp, Homo sapiens
gcgcggtagcatcgcggagtcggtgctttagtacgccgctggcacctttactctcgccggccgcgcgaacccgtttgagctcggtatcctagtgcacacgccttgcaagcgacggcgccatgagtctgacttccagttccagcgtacgagttgaatggatcgcagcagttaccattgctgctgggacagctgcaattggttatctagcttacaaaagattttatgttaaagatcatcgaaataaagctatgataaaccttcacatccagaaagacaaccccaagatagtacatgcttttgacatggaggatttgggagataaagctgtgtactgccgttgttggaggtccaaaaagttcccattctgtgatggggctcacacaaaacataacgaagagactggagacaatgtgggccctctgatcatcaagaaaaaagaaacttaaatggacacttttgatgctgcaaatcagcttgtcgtgaagttacctgattgtttaattagaatgactaccacctctgtctgattcaccttcgctggattctaaatgtggtatattgcaaactgcagctttcacatttatggcatttgtcttgttgaaacatcgtggtgcacatttgtttaaacaaaaaaaaaaaaaaaaaaggaaaaaccaacctcatggcctgtgggttattttggtcttgtaaggatccatttctttaaaatactgacatatagagttgtaccttatatagaatatagttgtatcttgaagtcaacatattaaattattctcaaaattatgtatttgcagattgtacttgtaagtttcaaagaaaaattaccatcttttcatattgacctggaaactaaataggatgtgattcagctacattaatttcttaatacaatctaaaaaaaaaaaaaaaaaaaaaaaaaaaa

SEQ ID NO: 465 - DNA, 3116 bp, Homo sapiens
agcgctcagatacgcgacgcgtagcaggcggggaccgaacgggtgcctcagtgtccttcccctcccctcgcctggcctcgccgtcctctccccgcagccggaccggaactatgtgatcccggaagttccggggcctttgctgtgtgggataaacagtaatggcggaggctgcaactcccggaacaacagccacaacatcaggagcaggagcggcagcggcgacggcggcagcagcctcccccaccccgatccccacagtcaccgccccgtccctgggggcgggcggagggggcggcggcagcgacggcagcggcggcggctggactaaacaggtcacctgcaggtattttatgcatggggtttgtaaggaaggagacaactgtcgctactcgcatgacctctctgacagtccgtatagtgtagtgtgcaagtattttcagcgagggtactgtatttatggagaccgctgcagatatgaacatagcaaaccattgaaacaggaagaagcaactgctacagagctaactacaaagtcatcccttgctgcttcctcaagtctctcatcgatagttggaccacttgttgaaatgaatacaggcgaagctgagtcaagaaattcaaactttgcaactgtaggagcaggttcagaggactgggtgaatgctattgagtttgttcctgggcaaccctactgtggccgtactgcgccttcctgcactgaagcacccctgcagggctcagtgaccaaggaagaatcagagaaagagcaaaccgccgtggagacaaagaagcagctgtgcccctatgctgcagtgggagagtgccgatacggggagaactgtgtgtatctccacggagattcttgtgacatgtgtgggctgcagctcctgcatccaatggatgctgcccagagatcgcagcatatcaaatcgtgcattgaggcccatgagaaggacatggagctctcatttgccgtgcagcgcagcaaggacatggtgtgtgggatctgcatggaggtggtctatgagaaagccaaccccagtgagcgccgcttcgggatcctctccaactgcaaccacacctactgtctcaagtgcattcgcaagtggaggagtgctaagcaatttgagagcaagatcataaagtcctgcccagaatgccggatcacatctaactttgtcattccaagtgagtactgggtggaggagaaagaagagaagcagaaactcattctgaaatacaaggaggcaatgagcaacaaggcgtgcaggtattttgatgaaggacgtgggagctgcccatttggagggaactgtttttacaagcatgcgtaccctgatggccgtagagaggagccacagagacagaaagtgggaacatcaagcagataccgggcccaacgaaggaaccacttctgggaactcattgaggaaagagagaacagcaacccctttgacaacgatgaagaagaggttgtcacctttgagctgggcgagatgttgcttatgcttttggctgcaggtggggacgacgaactaacagactctgaagatgagtgggacttgtttcatgatgagctggaagatttttatgacttggatctatagcaaccttgcgtggcgtgtgaactggtctgctgacctcagacagcagctgtcccctgtggtggtgtggcagtgcctgtgttctctcctaggcaggcctctcaactccaggtgctgtcctaagaatttttacccagggcctgtcttctcaacccctcacctttccctgaggagtgtgttgttttccctgttgaaaaaagttacaaaaataaatcttaaagttagttttttgtaacacgaatttaactgtcagacagttagtgtaggtgtgttgcgtcatctgttttcaaccagattgcatttatggacttttcacacactcattttgaggaccccaggttcaaaagtaaaagcagtggccctgctttggggtccaagaataggagtgatgggtgaagggacctaagctggccaatagccctctgccccagacatgggatgtggatccttgaggtttctggtgaaatctgcacatctgtgtttttatatctgttccctaccctgtaatccctaccacgtgcacttgttctgtggttttggtctcttgtttaattgcacacaagtaatactactgggtaaccagaatcaggtgtgaatgtgttgagattttttactgttttgcatgataggaaaattgagaaagaatacgtataaaagatagagaggcataacatcaatgcagagttggaagttggctcccaagggctgacatggtgtgagtgtgtgggtgtgtgataagcttctcatccctgcatagatgcagtattcttagccttagtagaaaaacctggtttagtggtttaagccttgtgtggcagatagatcttaaagggcaaagcagtatattggtagttgtcaatatagcagtgctagctctgtctatataaatagagaaatggggttagccatagaggttaaaactacctggttatcccatataataacacaaactgggtcttggatacacagttgtatttaatgttttacgatctagcctttccagtacaggcactttctgagaaacctttgtcctcacttgaggcattttgttgtcgggtttttgtgtttgtttttgtgggtatttgcctcattccacccctgagctttcaggtagacagacgtgattcaaaactctgttctaaggtgtttattgtagtggagtaatgggtttgcagtgataagtcatacttttccaccgaaagggagggcttgggaatccctgagattagctaaagttaagttgttggaagaattccttgattggaaattgtacctttgtgttttgttgctctgtttcctgaaaataactcggggatgctcctggtttgtccatctactgctttgattccttggatcccacccattctttcactttaagaaaaaacaaataattgttgcagaggtctctgtattttgcagctgcccttttgtaagaagcacttttcccaaataaaacaattaaaaaaaaaaaaaaaaaaaaaaaaaaaaaaaaaaaaaaaaaaaaaaaaaaaa

SEQ ID NO: 466 - DNA, 3034 bp, Homo sapiens
ccgctactctggccctcagggttgtgtagtttccggggccacggcacctgggcacaccaggtggcgtcgcgcctttgctttcctgagccttctgagtaaggtaatgtggtgtccgtggggcgacgcctgcgcacaagaccgcgtcgggcctcacttttcccaggccttctgggtaatgtagtttccgggatcggcacccggcctgtgccagcttgcagagctcaccaggtgcagacccctgcggccagggcgaggacggatctgagcagctgggcagcaggtgccaccgcctgtgggacccagagggcttgaggacatctgcaatgctccagaagcccaagagcgtgaagctgcgggccctgcgcagcccgaggaagttcggcgtggctggccggagctgccaggaggtgctgcgcaagggctgtctccgcttccagctccctgagcgcggttcccggctgtgcctgtacgaggatggcacggagctgacggaagattacttccccagtgttcccgacaacgccgagctggtgctgctcaccttgggccaggcctggcagggctatgtgagcgacatcaggcgcttcctcagtgcatttcacgagccacaggtggggctcatccaggccgcccagcagctgctgtgtgatgagcaggccccacagaggcagaggctgctggctgacctcctgcacaacgtcagccagaacatcgcggccgagacccgggctgaggacccgccgtggtttgaaggcttggagtcccgatttcagagcaagtctggctatctgagatacagctgtgagagccggatccggagttacctgagggaggtgagctcctacccctccacggtgggtgcggaggctcaggaggaattcctgcgggtcctcggctccatgtgccagaggctccggtccatgcagtacaatggcagctacttcgacagaggagccaagggcggcagccgcctctgcacaccggaaggctggttctcctgccagggtccctttgacatggacagctgcttatcaagacactccatcaacccctacagtaacagggagagcaggatcctcttcagcacctggaacctggatcacataatagaaaagaaacgcaccatcattcctacactggtggaagcaattaaggaacaagatggaagagaagtggactgggagtatttttatggcctgctttttacctcagagaacctaaaactagtgcacattgtctgccataagaaaaccacccacaagctcaactgtgacccaagcagaatctacaaaccccagacaaggttgaagcggaagcagcctgtgcggaaacgccagtgacacgtacacaccacgtcctggtctttgtttgaggcctgacgtgggcatcattttaacaggtgccttttttgtttttttgtttttcgtttttttggtcactccagtagctcctggaaaaaaccttaaaaaatgtttcctccaaatctgatttcattacatttctgaattgttggggttttttttgttgttttgttttgttttgtagatggagtttcacttttgttgcccaggctggagtgtagtggcgcgatctcggctcagcctcccgagtagctgggattacaggcatgtgccaccacgcccggctaatgtttgtatttttagtagagacggggtttcaccatgttggtcaggctggtctcaaactcctgacctcaggtgatccgcccacctcagcctcccaaagtgctgggatgacaggtgtgagccactgcgcccagcctgaatcatttcttataccttctgacagcccaacttccagaggacagctctggggtactcgttggatgtctgtgagtacctggtcatacgggtcagtagggataagaattgtctctgggctgaggaattcttctgttctctggtttcaccagcgttgggtttgctcatgtaatgtggtcaccatactcaaatggtgtcatggctgaagttggccaccttgcttgagggacaagttgtttatgtatcagctctctgctgggtctccctttccatggcaaatgggcagctccatcctcttgactcttctaaatgcccaaaagaggtgtcatgctttgggggtacgatgtttatactccgtaaagaacatacaaggacattcactgctgatttttttttttgtttgtttgagacagggtctcactctgtcgctcaggctggagtgcagtgatgcaatcttggctcactgcaacctccgcctctcaggttcaagtggttctcctgcctcagcctcccaagtagctgggattacaggcacctaccaccagggccagctaatttttgtatgtttagtagaaacggggtttcaccatgttggccaggctgttctcgaactcctgacctcaggtgatctgcccgcctcggtctcccaaagtgctgggattacaggcatgagccactgcacctgacctgctgaattgtttataatggcaagaaataggaaaccccccaatgtctgttgaacagctatcacgttgaaccacgtgaaactgctgttttctaggccaaaaatggtgagcgatcatttatttcatgattcaacctgatacatttacatagtgcaaaactgtgtcacagtttcaggcttttatgaggaaagcgtttctgtgtagaaactggaagctgttcagggcatcggcagctgaaccctgctccgttggtcagcgttactatcatctcggatcatatggagctcatgtcagccgtgtgggtggcgggtgcacagagacggtctggaaggaaacacgcggatctgaacagcagtaatcctgggggatacgggggttgggctagattacagagggctcattttctacgtcatgtattttatgatacttgaattttttgaaatgggcatttattttataacatgttaaaatgtactttttaaattaagtcattttgtaatatttgaatttttacatttgttgtacaatcaggaaaagcaataaagatttttcaaaaatagaaaaaaa

SEQ ID NO: 467 - DNA, 1901 bp, Homo sapiens
gcggcgagtggagcgggagccgactggaagaagggctctagggagggggctgtggctgctggggtccgaggtggggccgggtacaccagccccatcactgtttgcagagagtcagggaggcggaaaagacacgcgctctaggctcccatcagggcacatggcccgggcccatcccccgcgcgtctccccggctgcggggcgcggggggctgccgggtgcgcttggctgtggcgcggcgcgttggagactttattgcgatgggacgataagaggggcgggggcggggtcctgggggccgaggcggcagcgctttaattaaaacggaaattgcggccccgggccgcgcgggggccggagggttccaagcggccccttagctggaagcgtttctccaggacccccccgcaacccccgccacgcccgggctgccccctcccgccaggccctgccggacccggcgccgtcttctcctccttgtcacccgcggtcgcttcgggcggggatcggtgccaccgagcgcaaagcctgcctcgccccccttccccgtcccccccatctcccaccgcccagtccccggcggcgatgagacagagcggcgcctcccagcccctgctgatcaacatgtacctgccagatcccgtcggagacggtctcttcaaggacgggaagaacccgagctgggggccgctgagccccgcggttcagaaaggcagcggacagatccagctgtggcagtttctgctggagctgctggctgaccgcgcgaacgccggctgcatcgcgtgggagggcggtcacggcgagttcaagctcacggacccggacgaggtggcgcggcggtggggcgagcgcaagagcaagcccaacatgaactacgacaagctgagccgcgccctgcgctactactacgacaagaacatcatgagcaaggtgcatggcaagcgctacgcctaccgcttcgacttccagggcctggcgcaggcctgccagccgccgcccgcgcacgctcatgccgccgccgcagctgctgccgccgccgcggccgcccaggacggcgcgctctacaagctgcccgccggcctcgccccgctgcccttccccggcctctccaaactcaacctcatggccgcctcggccggggtcgcgcccgccggcttctcctactggccgggcccgggccccgccgccaccgctgccgccgccaccgccgcgctctaccccagtcccagcttgcagcccccgcccgggcccttcggggccgtggccgcagcctcgcacttggggggccattaccactagacggggcggtcgggtgcctgcggcctcgcccgcacgcctagagtctcgcccgatcccatcggcatcccggggagggcccgggagcctccgtcaaccgtcctctaatccagagtttactccacctgccgcacttagcagggggacgggaccgaagctccctcaatccttgtctggtactagatttgctcctgtcccaccccgcagtcccctgaggagggcgatgtgcgccctctttcactttttttcttctaggtctccaggtcccggaggggatttgtggacctctcttgtctccccaccactccagtgcatttccgcctggctcctagaagccccattcaatatcactactctttaacgagtgccaaatcttttcccacttttgctcttccccaaggaactgctcccacctcagcacgtggaggcctctcacggtcctccttcctgggacctgagcaggtttggtgaaagccaccgtcctccgtgacacacggcccccttcctcctgtccccacactcccaggagaaactcccggtgtgtttctgaccctttcagccccattaaagctcctgagctctcaaaaaaaaaaaaaaaaaaaaaa

SEQ ID NO: 468 - DNA, 5687 bp, Homo sapiens
ttccccgctgccagcactcaccctctctccgctcctgctcgcaacctcgcggttcctggggtgcttgtgcccactgtgtggacagcgcgggcggacttttgggccggggccgggcggcgggggaggctctctaaggcctccgcctctgcctctcccgcccccttacccgccccggagcgggaagcggcggaggctccgccatggcctcgggagccggaggagtcggagggggcggtggcggcaagatccggacgcggcgttgccaccaggggccaattaagccttaccagcaggggcgacaacagcatcagggcattcttagcagggttacagaatctgttaagaatattgtgccagggtggctacaaagatacttcaacaagaatgaagatgtatgcagctgttcaacagacacaagcgaggttccacgctggccagaaaataaagaggaccatctggtatatgccgatgaggagagctctaatattactgatgggagaatcacacctgagccagcagtcagtaatacagaagaaccttcaacaactagtactgcttcaaattatccagatgtgttaacaaggccttctcttcatcggagccatctgaatttttccatgttggaatcccctgcattacactgtcagccatctacatcctcggcattcccaattggcagttcgggattttcccttgtaaaggaaattaaagattctacctctcagcatgatgatgataacatctcaactaccagtggtttttcttcaagagcttctgataaagatataactgtttcaaagaacacttcattgccacctctgtggtccccagaagctgaacgttctcactcactctcacagcacactgccaccagctcaaaaaaaccagcattcaacttgtctgcctttggaacactttccccttcacttgggaattcttcaatccttaaaaccagtcagcttggagattctcctttttatcctggaaaaacaacatacggtggggcagcagctgctgtaagacagtctaaactacgaaatacaccttatcaggcaccagttagaagacaaatgaaagctaagcaactcagtgcacaatcttacggtgtgaccagttcaacagctcggcgaatattgcagtctttagagaagatgtcaagccctttagcggatgcaaaaagaattccatccattgtttcttctcctctgaattctcctcttgataggagtgggatagatatcacagattttcaggccaaaagagaaaaggtggattctcaatatcctcctgttcagagacttatgaccccaaagccagtttccatagcaacaaatcgaagtgtttattttaaaccatctctgactccttctggtgaattcaggaagactaatcaaagaatagataacaagtgcagtactggatatgaaaaaaatatgacacccggacaaaatagagaacaacgagaaagtggcttttcatatccaaatttcagtttgcctgcagccaatggtttatcttctggagtaggtggtggaggtggcaagatgagacgagaaagaacacgctttgttgcttctaaacctctggaggaggaggaaatggaagttccagtattaccgaaaatctctctaccgatcaccagttcttcactgcctacctttaattttagttcccctgagatcacaacttcctctccatcacccatcaattcgtctcaagcattaacaaacaaggtacaaatgacctctccgagcagcactggcagtcccatgtttaaattttcatctccaatcgtaaaatctactgaggcaaatgtactacctccatcatctattggatttacatttagtgtgcctgttgcaaaaacagcagaactttctggttctagtagtactttagaaccaattataagtagttcagctcatcatgtcactacagtgaacagtacaaattgtaagaagacaccacctgaagattgtgagggtccttttagacctgcagaaatcctgaaagaaggaagtgttctagatattctgaaaagccctggtttcgcatcgccgaagatagattctgttgctgctcagcccaccgcaacaagcccagtagtttatacaagaccagcaataagtagcttttcttctagtggaattgggtttggggagagtttaaaagctgggtcatcatggcagtgtgatacatgtctactccagaacaaagttacagacaacaaatgcatagcctgtcaagcagcaaaattgtcacccagagatactgctaaacagactggaattgaaacaccaaataaaagtggcaaaacaactctttctgcatcagggacaggctttggagacaaatttaaaccagtgataggcacttgggattgtgatacctgtttagtgcaaaataaacctgaagcaataaaatgtgtagcctgtgaaacaccgaaacctggaacttgtgtgaagcgagcccttacattgacagtggtttcggaaagtgctgagactatgactgcttcatcttccagctgcactgtaaccactggtaccttaggatttggagataaattcaaaaggcccattggatcttgggagtgttcagtatgctgtgtttctaataatgcagaagacaataagtgtgtgtcctgtatgtctgagaaaccaggaagttcagtacctgcttcaagtagcagcactgtacctgtctctctgccttctggaggctctctaggattggaaaagttcaagaaacccgagggaagctgggactgtgaattgtgcctagtgcagaataaggcagactctaccaaatgtttggcatgtgaaagtgcaaagccaggcacaaaatctgggtttaaaggctttgacacatcttcctcatcttcgaactcagcagcctcctcatccttcaaatttggtgtctcatcatcctcttctgggccttctcagactttaacaagcactggaaattttaaatttggagatcagggaggattcaaaataggtgtgtcatctgattctgggtctataaaccccatgagtgaaggctttaaattttctaaaccaataggagattttaaatttggagtttcatctgaatctaagcccgaagaagttaaaaaagatagtaagaatgataattttaagtttggactttcttctggtttaagcaacccagtttctttaactccatttcaatttggggtatctaatcttggacaggaagaaaagaaagaggaactgcccaaatcttcctctgcaggttttagctttggtacaggtgttattaactccacccctgctcctgctaacaccatagtgacctctgagaacaagagcagcttcaaccttggaaccatagaaaccaagagtgcttcagtggctcctttcacatgtaagacatcagaagctaaaaaagaagaaatgcctgccaccaaaggaggattctcttttggcaacgtggagcctgcctctctgccatctgcctcagtgtttgttttgggaaggacagaagagaaacagcaagagcctgtcacttctacttccctagtttttgggaagaaagctgacaatgaagagccaaagtgtcaaccagtgttttcctttgggaattcagagcaaaccaaagatgagaattcttcaaagtccacatttagttttagtatgacaaaaccatctgagaaggaatctgaacagccagcaaaagccacttttgcctttggagctcaaactagtactacagctgatcaaggtgcagcaaagccagtttttagtttcttgaacaacagttcctctagttcaagtacaccagccacttctgctggtggtggcatatttggtagttccacctcttcctccaatccacctgtggctacctttgtgtttggacagtccagcaatcctgtgagcagctctgcctttggtaacactgctgaatccagcacctctcagtctttgctattttctcaagatagcaaactagcaaccacatccagcacaggtacagctgtcaccccatttgtctttggtccaggagccagcagtaataatactaccacctctggtttcggctttggagccacaaccacatctagctctgcaggatcctcctttgtatttggaactggaccctcagcaccatctgccagtccagcatttggtgctaaccagaccccaacatttggacaaagtcaaggtgccagccagcccaatcccccaggctttggatctatatcatcttccacagcattatttcccactggttctcagcctgcaccacctacttttgggacagtgtcaagcagtagccagccccctgtgtttggacagcaacctagtcagtctgcatttggctctggaacaactcctaattctagttcggctttccagtttggcagcagcactacaaatttcaacttcacaaacaacagtccatcaggagtgttcacatttggtgcaaattctagcacacctgcagcctcagcccagccttcaggctcggggggctttccatttaaccagtctccagcagcatttacagtggggtcaaatgggaaaaatgtgttctcttcttctggaacttcattctctggtcgcaagataaagactgctgttagacgcaggaaataaaggtcacattggtgttgtactcaattttaacaacagctggtgccctgctttcagatactggattgtactttgtgctggggttatctgaagtcagatctgcctaaggacttctttaattttggaattttcctcctttctctttcgttacagaagccccaccctgcctcacccacccttttttaaataaataaatagctagactggtgactgattcttcagcaaaaatattttatgatccagcagattattcactgatttgacatagtctggctgtacccaggaatggagcctgcacggtgaatggctttgtatagaacctctttgtctacaccattatgtgcgctgataagcgttcatggaacgcgttgaaattgtaattatatctgaggaattctgtatagattagaattctgtatagattagagagtgttgaaacggatgatttctatgctgagtttgtgctggtgtatgtgtgaagtgagtgagttgggtgtattgtgcgctaaacttttctgatagaggaagcctgattaaagaatggtccgtgctaaggacttgttagatctagttcactctccatttaataattatatgctatttctatattttcattctcctatcacctgtcttgcctttttcattattttattatgaaacttgtgtaaatacaattttgtttctgtactttttggcataacataaatctgtgaacttgaaatttgaattttgtgttagagatttttttgttgtttgtttagtcttgtctcagattttattatgtaaatcccattattcaaagttgcctaaatccatttggaaatctttaaaaaaaaaattggggattcttaaagttgaatttattggcttttctgatccagttttgtttggaccaaaaaccagtattgtacaaagtattaagcatatatttttatatttactaaaatggactgtggtgactttggataataaggaaaagtttaatattaaagccatgtttattacagtataattaacatgttaaaccatgggataaatgccatcaataaaaaattatgacat

SEQ ID NO: 469 - DNA, 1073 bp, Homo sapiens
ctctgcggggagacgccagcctgcgtctgccatggggctcgggttgaggggctggggacgtcctctgctgactgtggccaccgccctgatgctgcccgtgaagccccccgcaggctcctggggggcccagatcatcgggggccacgaggtgaccccccactccaggccctacatggcatccgtgcgcttcgggggccaacatcactgcggaggcttcctgctgcgagcccgctgggtggtctcggccgcccactgcttcagccacagagacctccgcactggcctggtggtgctgggcgcccacgtcctgagtactgcggagcccacccagcaggtgtttggcatcgatgctctcaccacacaccccgactaccaccccatgacccacgccaacgacatctgcctgctgcggctgaacggctctgctgtcctgggccctgcagtggggctgctgaggctgccagggagaagggccaggccccccacagcggggacacggtgccgggtggctggctggggcttcgtgtctgactttgaggagctgccgcctggactgatggaggccaaggtccgagtgctggacccggacgtctgcaacagctcctggaagggccacctgacacttaccatgctctgcacccgcagtggggacagccacagacggggcttctgctcggccgactccggagggcccctggtgtgcaggaaccgggctcacggcctcgtttccttctcgggcctctggtgcggcgaccccaagacccccgacgtgtacacgcaggtgtccgcctttgtggcctggatctgggacgtggttcggcggagcagtccccagcccggccccctgcctgggaccaccaggcccccaggagaagccgcctgagccacaaccttgcggcatgcaaatgagatggccgctccaggcctggaatgttccgtggctgggccccacgggaagcctgatgttcagggttggggtgggacgggcagcggtggggcacacccattccacatgcaaagggcagaagcaaacccagtaaaatgttaactgacaaaaaaaaaaaaaaaaaaaa

SEQ ID NO: 470 - DNA, 946 bp, Homo sapiens
ctctctcggtttgtctgggtcatcttgtctgcccgccgctggcctggccccgtctgtctctctcagcagctgtctttctcgcgcccactggccggtctctcctcttccccgcagttgcctccttctctgcctgcctgggtggccgccatgggccggaagcggctcatcactgattcctacccggttgtgaagaggagggaggggcccgctgggcacagcaagggggagctggcacccgagctaggggaggagccccagccccgcgacgaggaggaagcggagctggagctgctgaggcagtttgacctggcctggcagtacgggccctgcaccgggatcacacggctgcagcgctggtgtcgggccaagcatatgggcttggagcctcccccagaggtgtggcaggtgctgaagacccaccccggagacccccgcttccagtgcagtctctggcatctctatcccctatgaggcaccacgtaagacctcctgcccttagctctcttgctcaccacccaagaacctcaggacagaagcgagagcccattgctcctgctcagctcagcccggctgcggaggaacccttggcaggcagaacctggaggtgtcagaggctcaactcctccatctaaccagcaggctcccagagtccccggaagagcctgcgcagctgaagcagagtgcttctagatggagagtggtcactggggaaaaggacctggccatcaccttccaatacctgctgcctgtctccctgacccatgatctggcaagttaggcacagtcagacatggacagttgatccatgaggaaaagatgctctcccacctaaggccaggaatctgagagcaggactggctgagctcccagggcaaggggttcactaatgcttatcaataaagaatattgagcctggaaaaaaaaaaaaaaaaaaaaaaaaaaaaaa

SEQ ID NO: 471 - DNA, 6826 bp, Homo sapiens
gatccggaagtcggagcctagctgcgcgagagtttctgctcgctcaaccgagttgtcgtgttgccctcgcttctcagatccccgccggaagtgaagagagcaagcagatttgaacctatctgctttcaagctggtcatcatgatgaaacttagacacaaaaataaaaagccaggtgaaggttccaagggccacaagaagataagttggccctaccctcagcctgcaaagcaaaatgggaagaaagcaacctccaaagtgccctctgcacctcattttgttcaccccaatgatcatgccaatcgagaggctgaattaaagaagaagtgggttgaggagatgagggagaagcagcaagccgcccgggagcaagaaagacaaaaacgcaggaccattgagagctactgtcaggatgtcctaagacgccaggaggagtttgagcataaggaggaagttttgcaggaattaaatatgtttcctcagctggatgacgaggccacgaggaaggcttattacaaggagttccgtaaggtggtggaatactctgatgtgattctggaagtcctggatgccagagacccattaggctgccgctgcttccaaatggaggaggctgtcctgcgagcacaaggcaacaagaagctggtcctggtcttgaacaagattgacctggtccccaaggaggttgtggagaaatggctggattaccttcggaatgagttgccaaccgtggctttcaaggccagtacccagcatcaggtcaaaaacctgaatcgttgcagtgtgccagtagatcaggcctctgagtcactgctgaaaagcaaagcctgctttggagctgaaaacctcatgagggttctggggaactattgccgccttggtgaagtgcgcacccacattcgtgtgggtgttgtgggtcttcccaatgttgggaagagcagcctgatcaatagcctgaagcgcagccgcgcatgcagcgtgggagctgttcctggaattaccaaattcatgcaggaggtctacctggacaagttcatccggctcttggatgctccaggcattgtcccagggcccaactcagaggtgggcaccatcctgcgtaactgcgtccacgtgcagaagctggcagaccctgtgaccccagtggagaccatcctgcagcgctgcaacctggaggagatttccaactattatggcgtctctgggttccagaccactgagcactttctgacggcagtggcccaccgtttggggaagaagaagaagggaggcttatatagtcaggaacaggcggccaaagctgtcctagctgactgggtgagcgggaagatcagcttctatataccaccaccagccactcacactctgcccacccatctcagtgctgagatcgttaaggaaatgaccgaggtctttgacatcgaggatactgagcaggccaatgaagacaccatggaatgcttggccaccggagaatctgatgagctgttgggtgacacggacccacttgaaatggagatcaagttgctccattctccgatgacgaaaatagcagatgccattgaaaataaaaccaccgtgtataagattggagatctcactgggtattgcaccaatccgaaccgtcatcagatggggtgggctaaacgcaatgtggaccaccgccctaagagcaacagtatggtggatgtctgctcagtggaccgccgctcagtgctgcagaggatcatggagacggaccccctgcaacagggccaggctctggcatctgccctgaaaaataagaagaagatgcagaaacgtgcagataaaatcgccagcaagctgtctgattccatgatgtctgctctcgacctctctggcaatgctgatgatggtgttggtgactaatcgactgatctcacttcccttccgctccaagcaccagttccggtggtacgggggaataccagtgaaatagtttggttctccctgaagcatctgcatattgaaagaacgctttccccactgtgtgtcttctccccctcctccagtaaaaacagtcccggctaggtgctgtggctcacgtctgtaatcccagcactttgggaggccgaggtgggcagatcacctgaggtcaggagttcgagaccagcctggccaacatggtgaaaccccgtctctactaaaaatacaaaaaaatttagccgtgcttagtggcacctataatcccagctacttgggaggctgaggcaggagaatcgcctgaacctgggagactaaggcaggagaatcgcctgaacctgggaggcagaggttgcagtgagcccagacggcaccattgcactctagcctgggcaacaacacgaaactccgtcccaaaaaaaaaaaaaaaaaaaaaatcccaaggggctgcagctgccaaacccaataccctctatttaacccctactctgttttacaagagaaataaaagaagtatcagcagagctcaggtgctaacacctgttgagggctgacctacaaaactctgcctacaaaactctcttagacaggtgaatatgccactagaagttaggttgctggtagacctgggggtccctgcgggagggtgatggtttctttaccaccccacaggagatttcagtggcaaggcatgcctgcagtgggctttgggccatgcatcttccaagtccataggtcttcacctgggtggcagtgagaaaaagtagaaagtaatgagcctcctgtgtctctggaaggttctagggatagggtagagggaagaagagaacaaacaagcctggcttgtgctgaagtgtggtaggcactaccctgtttgcgtgaagagaaaacaaagcacctgttagtagggaggctttagggggaagccccgtcttgggggcatttctgggcagattgtgaattggaggaatctctttaactgaagtactctggctggaccctgcccttgtgtgaccatgtctcctattgcaccagcatttgaattccatggctcaagagggttctggtaccatttattcacagactgtatcctcgagagagctgctatatatgggagtgtaccagccaactccttttccagtgtctgtaagtcacctcattaaagtataattagctgtctcctctgggagatcctaccccatcagacaagggcagtgagcccaagcagtgccagaggccctcagaaagggattagggtagatgattgcaactgaaacacaatcttctttctttgccagggtattttgggggttttgccccaaaatataccctgggcatagcattactgcagtcttggatgtctaccccaaacttccacaccatccttcgacccacagctgcacctttatttatttattttgctctgttgcccaggctggagtgcaatggcgtgatctcggctcactgcaacctctgcctcccgggttcaagtgatcctcctgccttagcctcccaagtagctgggattacaggcacctgccaccacgcctggctagtttttgtatttttagtagagacgatgtttcaccatgttgaccaggctggtctcgaactcttgacctcaagtgatccactcgcttcggcctcccaaagtgctgggattataggcgtgagccactgtgcccagcctcacagctgcatcttaaccttacctttgcctctgcctctcaagctggtacctcctaatttacatcctaagagtggaaccatgtgacaaggactggagtgccattggctgtggactgttcaggcagggaagtacaagaccactcttgtattcaggggcaaccaaaggagagaattacgtacttgttgagtacaaactgcaccaagccctggagacccattaccaccgttaaccctcaatacagctctgctagtaagggattcgtctccccaaatgaaaaaaaaaagtaatctcagaatgttggccgagcatggtggctcacacctgtaatcccagttatgcaggaggctgaggcaggagaatcacttgatctcaggaggcggaggttgcagtgagtcgacatcacaccactgcactccagcctgggggacagagtgagacttcgtctcggaaaaaaaaaaaaaaagttgacaggatggccagacccaagtgggcgtattaagtggtggtgctaggattggaacccaagcgtgattaaaaccctatgcaggccctttcctctatattgtactgcctccttaacaaaggaagattgattaagcccctactttgtgccagtctctgttatcaagtccgttaaatgcatttaacgttaaattttttcttttttggtttaaaaaactctagtttcttaaactactagtttttagtgtcttgctaaaactatgtgctcttgaataggctacaacttatttcacactatctcattgaactctcctggtatgtgatagtgttataatgaaaaattgcataccaggacagctaagtctattttgcaaccatacagcgtttcataatttagcatttaaaatacagacagtccccgacttttggtggtttgatgtgggatttttggtggaaaagcagtatacattcagaatgcacctctacttatgatggggctacttcctggtaaacccattgtaatgtgcaaattacgggtttatcaggaggtgaccccatcggtaatggagaagtgctgggaggtaaatattagaaatggaagtatctaaatgagtaagaaacagcatgggagcataatttggccaaaatcaaacagaactaaagtagtcatgtcggtaagaatttgggactgcaggccagttacgatagctctcacctgtaatcccagcattttgggaggccgaggcaggcggatcacttgaggtcaggagttcaagaccagcctaaacaatatggcgaaacctcatctctaccaaaaaaatacaaagattagctgggcatggtgtctcatgcctgtagtcccagctacctatggggctgaggcaggaggatctcttgagcccaggaggtcgatgctgcattgagccgagattgtgccactgctctccagcgtgggcaacagagtgagactgtctcagggggaaaaaaaaagaggaaaacaaaaaagacgttgggagtgcagtttctctacctacagcatatctcaaaggttttttttaaaaaagtattttcttaactttttaccttcatttttcaaaacaattagggtacaatttacatatagtaaagttcactctttatagttttagttatgtgagtttgtacaaacatatacaggagtgaaccactaccacaatcgaaatatagttgcatcacccccctaaaactctccaggcccttttgtagtcaactcctacccccgaccctcagattctgctaaccactgatttgttttctgcccctatagttttgctttagtatgactgtcatatcaatagaatcatacaatgagtaggcttattttatgccttcaggttttaaaaattataaacatttacattacagtaaaattcactctggtatacagttctataaagctctgataaatgtgtagagttgtgtaaccaccaatgcaaccaaggtacagaacagtcctcttagcctctccctaccaaatttattcctgctactttgtagtcaaaaccagtcccctacacccaaaccctggcagtcactggtttttttcttcgttctcttttttttttttttttttttgagacagagtctagctctgttgtccaggctggagtggtgcagtggcgtgatctcggttcactgcaacctccgcctccagggttcaagcggttctcctgcctcagcctcccgagtagctgggattatgggcgcccgccaccacgcccagctaatttttgtatttttagtagagatggggtttcactgttttggccaggctggtctcgaactcctgacctcatgatcctcctgcctcagcctcccaaagtgctgggattacaagagtgagccactgcgcctggcctttttctttgttcttatatttttgtcttttttttttttttttttttgaaacagagtctcactctttcactgaggctggagtgcagtggcgtgatcttggctcactgcaacctccacctcctgggttcaagcgattctcctgccttagcctcccgagtaacagggactacaggtgcccaccaccatgctgggctaatttttgtatttttagtagaggcgggggtttctccacactggccaggctggtcttgaacttctgacctcaaaagatccacccacctcggcctcccaaagtgctgggattataggcatgaaccaccgtgtccggccatatattttcgtcttttgaagactgttatatacatgaaattatatggtatgtagcattttgagagcgacttcttttgctatgagtaatacatttgagattcatccatatttctcagtatattaatagttcttatttctgagtcactccattgtgtggatttactactgtttgttccccagttgaaggatgtttaggatctttgcagttttggacaattacaagtaaagctgctataaacatttgtatgcaacattttgtgttttcatttatctatagtaaatacctagagttggattgctgggatatatggtaagcatatgtttgacattttaagaaacttctaaactgtttttcaaagtggctctaccatttcacattcccatcagtatgaaagtttcatttccacatcctctctagtacttgggggtgtcagtttagttttttaatttttaaattttttaatttttttaatacatttaaatagagatggggtctcactgtgttg

SEQ ID NO: 472 - DNA, 7852 bp, Homo sapiens
ggcgctgagcgagctcggagcccgcgctgtgcgcctgcggccggggcgccccgccgagcgccggtgccccggctcccgggccgccttcgccgcgcgggaaggattcttcaaaattaacagaaaccaattcgggccagctgaagagaaaaaataaaggtggctcccggctgcctctgctgcagttcagagcaacttcaggagcttcccagccgagagcttcaggacgcctttcctgtcccactggcccagttgccacaacaaacaacagagaagacggtgaccatgggggatgtgaagctggttgcctcgtcacacatttccaaaacctccctcagtgtggatccctcaagagttgactccatgcccctgacagaggcccctgctttcattttgccccctcggaacctctgcatcaaagaaggagccaccgccaagttcgaagggcgggtccggggttacccagagccccaggtgacatggcacagaaacgggcaacccatcaccagcgggggccgcttcctgctggattgcggcatccgggggactttcagccttgtgattcatgctgtccatgaggaggacaggggaaagtatacctgtgaagccaccaatggcagtggtgctcgccaggtgacagtggagttgacagtagaaggaagttttgcgaagcagcttggtcagcctgttgtttccaaaaccttaggggatagattttcagctccagcagtggagacccgtcctagcatctggggggagtgcccaccaaagtttgctaccaagctgggccgagttgtggtcaaagaaggacagatgggacgattctcctgcaagatcactggccggccccaaccgcaggtcacctggctcaagggaaatgttccactgcagccgagtgcccgtgtgtctgtgtctgagaagaacggcatgcaggttctggaaatccatggagtcaaccaagatgacgtgggagtgtacacgtgcctggtggtgaacgggtcggggaaggcctcgatgtcagctgaactttccatccaaggtttggacagtgccaataggtcatttgtgagagaaacaaaagccaccaattcagatgtcaggaaagaggtgaccaatgtaatctcaaaggagtcgaagctggacagtctggaggctgcagccaaaagcaagaactgctccagcccccagagaggtggctccccaccctgggctgcaaacagccagcctcagcccccaagggagtccaagctggagtcatgcaaggactcgcccagaacggccccgcagaccccggtccttcagaagacttccagctccatcaccctgcaggccgcaagagttcagccggaaccaagagcaccaggcctgggggtcctatcaccttctggagaagagaggaagaggccagctcctccccgtccagccaccttccccaccaggcagcctggcctggggagccaagatgttgtgagcaaggctgctaacaggagaatccccatggagggccagagggattcagcattccccaaatttgagagcaagccccaaagccaggaggtcaaggaaaatcaaactgtcaagttcagatgtgaagtttccgggattccaaagcctgaagtggcctggttcctggaaggcacccccgtgaggagacaggaaggcagcattgaggtttatgaagatgctggctcccattacctctgcctgctgaaagcccggaccagggacagtgggacatacagctgcactgcttccaacgcccaaggccagctgtcctgtagctggaccctccaagtggaaaggcttgccgtgatggaggtggccccctccttctccagtgtcctgaaggactgcgctgttattgagggccaggattttgtgctgcagtgctccgtacgggggaccccagtgccccggatcacttggctgctgaatgggcagcccatccagtacgctcgctccacctgcgaggccggcgtggctgagctccacatccaggatgccctgccggaggaccatggcacctacacctgcctagctgagaatgccttggggcaggtgtcctgcagcgcctgggtcaccgtccatgaaaagaagagtagcaggaagagtgagtaccttctgcctgtggctcccagcaagcccactgcacccatcttcctgcagggcctctctgatctcaaagtcatggatggaagccaggtcactatgactgtccaagtgtcagggaatccaccccctgaagtcatctggctgcacaatgggaatgagatccaagagtcagaggacttccactttgaacagagaggaactcagcacagcctttgtatccaggaagtgttcccggaggacacgggcacgtacacctgcgaggcctggaacagcgctggagaggtccgcacccaggccgtgctcacggtacaagagcctcacgatggcacccagccctggttcatcagtaagcctcgctcagtgacagcctccctgggccagagtgtcctcatctcctgcgccatagctggtgacccctttcctaccgtgcactggctcagagatggcaaagccctctgcaaagacactggccacttcgaggtgcttcagaatgaggacgtgttcaccctggttctaaagaaggtgcagccctggcatgccggccagtatgagatcctgctcaagaaccgggttggcgaatgcagttgccaggtgtcactgatgctacagaacagctctgccagagcccttccacgggggagggagcctgccagctgcgaggacctctgtggtggaggagttggtgctgatggtggtggtagtgaccgctatgggtccctgaggcctggctggccagcaagagggcagggttggctagaggaggaagacggcgaggacgtgcgaggggtgctgaagaggcgcgtggagacgaggcagcacactgaggaggcgatccgccagcaggaggtggagcagctggacttccgagacctcctggggaagaaggtgagtacaaagaccctatcggaagacgacctgaaggagatcccagccgagcagatggatttccgtgccaacctgcagcggcaagtgaagccaaagactgtgtctgaggaagagaggaaggtgcacagcccccagcaggtcgattttcgctctgtcctggccaagaaggggacttccaagacccccgtgcctgagaaggtgccaccgccaaaacctgccaccccggattttcgctcagtgctgggtggcaagaagaaattaccagcagagaatggcagcagcagtgccgagaccctgaatgccaaggcagtggagagttccaagcccctgagcaatgcacagccttcagggcccttgaaacccgtgggcaacgccaagcctgctgagaccctgaagccaatgggcaacgccaagcctgccgagaccctgaagcccatgggcaatgccaagcctgatgagaacctgaaatccgctagcaaagaagaactcaagaaagacgttaagaatgatgtgaactgcaagagaggccatgcagggaccacagataatgaaaagagatcagagagccaggggacagccccagccttcaagcagaagctgcaagatgttcatgtggcagagggcaagaagctgctgctccagtgccaggtgtcttctgaccccccagccaccatcatctggacgctgaacggaaagaccctcaagaccaccaagttcatcatcctctcccaggaaggctcactctgctccgtctccatcgagaaggcactgcctgaggacagaggcttatacaagtgtgtagccaagaatgacgctggccaggcggagtgctcctgccaagtcaccgtggatgatgctccagccagtgagaacaccaaggccccagagatgaaatcccggaggcccaagagctctcttcctcccgtgctaggaactgagagtgatgcgactgtgaaaaagaaacctgcccccaagacacctccgaaggcagcaatgccccctcagatcatccagttccctgaggaccagaaggtacgcgcaggagagtcagtggagctgtttggcaaagtgacaggcactcagcccatcacctgtacctggatgaagttccgaaagcagatccaggaaagcgagcacatgaaggtggagaacagcgagaatggcagcaagctcaccatcctggccgcgcgccaggagcactgcggctgctacacactgctggtggagaacaagctgggcagcaggcaggcccaggtcaacctcactgtcgtggataagccagaccccccagctggcacaccttgtgcctctgacattcggagctcctcactgaccctgtcctggtatggctcctcatatgatgggggcagtgctgtacagtcctacagcatcgagatctgggactcagccaacaagacgtggaaggaactagccacatgccgcagcacctctttcaacgtccaggacctgctgcctgaccacgaatataagttccgtgtacgtgcaatcaacgtgtatggaaccagtgagccaagccaggagtctgaactcacaacggtaggagagaaacctgaagagccgaaggatgaagtggaggtgtcagatgatgatgagaaggagcccgaggttgattaccggacagtgacaatcaatactgaacaaaaagtatctgacttctacgacattgaggagagattaggatctgggaaatttggacaggtctttcgacttgtagaaaagaaaactcgaaaagtctgggcagggaagttcttcaaggcatattcagcaaaagagaaagagaatatccggcaggagattagcatcatgaactgcctccaccaccctaagctggtccagtgtgtggatgcctttgaagaaaaggccaacatcgtcatggtcctggagatcgtgtcaggaggggagctgtttgagcgcatcattgacgaggactttgagctgacggagcgtgagtgcatcaagtacatgcggcagatctcggagggagtggagtacatccacaagcagggcatcgtgcacctggacctcaagccggagaacatcatgtgtgtcaacaagacgggcaccaggatcaagctcatcgactttggtctggccaggaggctggagaatgcggggtctctgaaggtcctctttggcaccccagaatttgtggctcctgaagtgatcaactatgagcccatcggctacgccacagacatgtggagcatcggggtcatctgctacatcctagtcagtggcctttcccccttcatgggagacaacgataacgaaaccttggccaacgttacctcagccacctgggacttcgacgacgaggcattcgatgagatctccgacgatgccaaggatttcatcagcaatctgctgaagaaagatatgaaaaaccgcctggactgcacgcagtgccttcagcatccatggctaatgaaagataccaagaacatggaggccaagaaactctccaaggaccggatgaagaagtacatggcaagaaggaaatggcagaaaacgggcaatgctgtgagagccattggaagactgtcctctatggcaatgatctcagggctcagtggcaggaaatcctcaacagggtcaccaaccagcccgctcaatgcagaaaaactagaatctgaagaagatgtgtcccaagctttccttgaggctgttgctgaggaaaagcctcatgtaaaaccctatttctctaagaccattcgcgatttagaagttgtggagggaagtgctgctagatttgactgcaagattgaaggatacccagaccccgaggttgtctggttcaaagatgaccagtcaatcagggagtcccgccacttccagatagactacgatgaggacgggaactgctctttaattattagtgatgtttgcggggatgacgatgccaagtacacctgcaaggctgtcaacagtcttggagaagccacctgcacagcagagctcattgtggaaacgatggaggaaggtgaaggggaaggggaagaggaagaagagtgaaacaaagccagagaaaagcagtttctaagtcatattaaaaggactatttctctaaaactcaaaaaaaaaaaaaaaactcaagatagtaaaagcacctagtgtgatagattatcggttaggtcatttgtgggttgattcttcagaaacagcagttgatacctagcagcgttattgatgggcattaatctatgttagttggcaccttaagatactagtgcagctagatttcatttagggaaatcaccagtaacttgactgaccaattgattttagagagaaagtaaccaaaccaaatatttatctgggcaaagtcataaattctccacttgaatgcgctcatgaaaaataaggccaaaacaagagttctgggccacagctcagcccagagggttcctggggatgggaggcctctctctccccaccccctgactctagagaactgggttttctcccagtactccagcaattcatttctgaaagcagttgagccactttattccaaagtacactgcagatgttcaaactctccatttctctttccccttccacctgccagttttgctgactctcaacttgtcatgagtgtaagcattaaggacattatgcttcttcgattctgaagacaggtccctgctcatggatgactctggcttccttaggaaaatatttttcttccaaaatcagtaggaaatctaaacttatcccctctttgcagatgtctagcagcttcagacatttggttaagaacccatgggaaaaaaaaaatccttgctaatgtggtttcctttgtaaaccaggattcttatttgtgctgttatagaatatcagctctgaacgtgtggtaaagatttttgtgtttgaatataggagaaatcagtttgctgaaaagttagtcttaattatctattggccacgatgaaacagatttcaactgataaagagctggagaactccatgtactttggaatctcctccaagatagccagagtttaatacatcttcattctcaacactctccaaagaacttgacctaccttatgggttccatatttttcttcttaaatgtgcatcaatcatgccttgcccccaacctttaaatatattcttagacctggtaaatgcactcagacttgcgtctttaggaatttttaactttctttcactacattggcacttaaattttttctttataaagctttttgaaggtcataaacaaagaccataattgatgatagacctaatacatttcctctgtgtgtgtgtgtaacattccaaatactttttttttcttttccactgtttgtaaggtgcaacaatttaatatttttaagggactttttaagagttccttaagaaccaatttaaaattacttcagtgcaatcctacacagtatcaacattagaattttgatattagtcttatgttatcttccattctatttttatctgctttttgctgctagtttcaaactgccagtatttttccttttgcttttaaaatagttacaatatttttcatgatagccacagtattgccacagtttattataataaagggtttttatttgatttagcgcattcaaagcttttttctatcacttttgtgttcagaatataacctttgtgtgcgtgtatgttgtgtgtgtgcatgtgtggcgtatatgtgtgttacaggttaatgccttcttggaattgtgttaatgttctcttggtttattatgccatcagaatggtaaatgagaacactacaactgtagtcagctcacaatttttaaataaaggataccacagtgcatgctgtttgttcaaaaaaaaaaaaaaaaaa

SEQ ID NO: 473 - DNA, 9116 bp, Homo sapiens
gaaccgagtggccggcacttccggccggcggcggctgctccgggtgagcaggcccctgaagtgctgtgcctggagataccattgtggaccctggagaggcacctgctgcttatgcggtaaaacctctaccaccccaaacctggtcagtttgaggggagccgctgccatagtatccacagagaaggccggagttccagccgtgtggagcagcagaggggagtctgacagggtcacctcctacacagagagaattggcagctgactgcactgccaggagccaaggcctaggtgtgtggagcctggaagaccagggatacctgaggcaggaggtgcagcgtgtggagtgagaaacccgagagggactggggcctgtgctcaggatcagcagagcaggcaggcagagtggagagggagagacggagccccagaaggggagcaggaggagagggaagtagtggcagcagcccaggccaggcgtgtgtcctgcaagtgctaggaccagccacccctccccatggcctccaagccggctgccgggaagagcagaggggagaagcggaagagggtggtgctgacactgaaggagaagattgacatctgcacgcgcctggagaagggcgagagccggaaggcactgatgcaggagtacaatgtgggcatgtccaccctctacgacatcagggcccacaaggcgcagctgctccggttcttcgccagctcggactccaacaaggcgctggagcagcggcgcacgctgcacacgcccaagctggagcacctggaccgcgtcctgtacgagtggttcctggggaagcgctccgagggcgtccccgtgtcaggccccatgctcatcgagaaggccaaggacttctacgagcagatgcagctcactgagccctgcgtgttctccggagggtggctttggcgctttaaggccagacacggcattaaaaagctagatgcatccagtgaaaagcagtcagccgaccaccaggccgcggagcagttctgtgcgtttttcaggagcttggctgctgagcacgggctgtccgccgagcaggtttacaacgctgatgagaccggccttttctggcggtgcctgccaaatcccactccggaaggcggggctgtgcctggccccaagcagggcaaggaccggctgaccgtgctgatgtgtgccaacgccacgggctcccacaggctcaagcccttggccatcgggaagtgcagcggtcccagggctttcaaaggcatccagcacctgcccgtcgcctataaggcccaggggaatgcctgggtggacaaggagattttttccgattggttccatcatatctttgtgccctcggtgagagagcacttcagaaccataggtttgccggaagacagcaaagccgttctcttgctggacagctcccgggctcacccgcaggaggccgagctggtgtccagtaacgttttcaccatcttcctgcctgccagcgtggcctcattggtgcagcccatggagcagggcattcggagagatttcatgaggaacttcattaaccctccggtccccctgcagggcccccatgcccgctacaacatgaacgatgccatattcagcgtggcctgtgcctggaacgcagtccctagccacgtcttcaggcgggcctggaggaagctgtggccgtcggttgcgtttgccgaaggctcctcctctgaggaggagttggaggcagagtgcttcccagtgaagccccacaacaagtcctttgcacacatcctggagcttgtgaaggaaggctcctcctgcccgggccagcttcgccagcgccaggccgccagctggggggtagcgggaagggaggcagaagggggacggccccctgctgccacgtcgccagcagaggttgtgtggagttcagaaaagactccaaaagctgaccaggacggcggaggagatcctggtgagggcgaggaggtggcctgggagcaggcggccgtggcctttgacgcagtcctgcgctttgcggagcggcagccatgcttcagtgcgcaggaagtggggcagctgcgggcgctgcgtgccgtgttccggagccagcagcaggtgaggaggcggcgtggtgccctcggggctgtggtcaaggttgaagccctccaggagggccctggtggctgtggggccacagctcagtctcccttgccctgctcatccacagcaggtgacaactgatggcttctctgccctgccctggccactggccctgtttctccccacaccctggagtggcatggtcctgtgccccgaccccacctgaggcaggagggcatgtgcagacactcaagagcccttccaggagtgggtcgcccacgggtgtggctcgggtgcccaggacggtctgtgcccgaggttcctgtcaatacaggttttattttatcacttgccgtgtcatccgaaagtgaggaaatgttttggaagggtccaccctagcctagaacaagccagagccgcaccctggctggaatgggggccaggctgagccgatctggtctcgtgttcgctggctgatcattgcagtatcagagggtggagatgtcagtctgtccacgtggagagaagttgccctccaggccgacaggaggccatgcccaccgcccctggacaggcttcgtctcagaaggctctatctgctgggctggcggccatccccgtgttgggtggaccccgagcacggttgcctgaggtccgatggcccgagagctgggactcagttcttggcctgctagcggctgaacaggccgcacatctcacttcagttgtggcctcattcagcagaatgactctggaaccatcctctgttacccgcagatcctgtcccatgggctctggccccaagatgttggggggccccacggagagttgacttggtagagttcctttctgggaagaaagtaggagtggctgaccaggccctgctcatcacccggatagaggacacggaccctgtgtggtattttggcattttggctcagagtccaatgtaccatgttgcccagaatttcatacttacggcctttacatgaatacgtcttgatcagacattcagagattagtcttaggtttccacgtaagtcactgaaaacagtaaaacaggctgcttagatttctagcagtatgtgtgctcttatccccagctgttagcacgttagtaatacttttggggaggagttgtctgtcctggtcagttttcacagaggcggttgtaagaggatgtggttattttctccatgtctgtagttgctttgcggcatctccatttcacgggcaacactcactgcctgcagctgagattccagaacgccctgtgtccacagtgattagcctcgtctttcagcgagcataaaataggtgcattgtccttttcttttcttgaggcagggtctcactctgttgaccaggctggagtgaagtggtgtgatcccagctcactgcagcctcgacctccctggcttgagtgatcctcccgccccagcctcctgagtagctgggactagaggcacgcaccaccgcgcctacctttttattttttttgtagagacagggtctcactgtgttgcccaggctggtcttgaactcttggcctcaagcgatcctccttcctcatccttctaaagtgctgggattacaggtgtgagccacagcactcggcctaaataggtttttcttgctatgttattttcagtgctttgcccttgaattcttttcctctcttaaattcatatcatttggccgagtcagcacgtagtttgcattccagcgtctgctgttgattccactgaaacctctgttctcatgaaggagaggatttggctcgctgtggtttctcgtactttcacatctctgtagatacaggggcaaaagtcattgctgacagagccctatctatgtcctggaagtgtgtgtttcttgctttgaatgcatgtgtgaagattataaaagccaaatagtttttaaagatctcggtgctgaacgacagtcccagttcccatttgtgtcccattgtctttgtggtgtcacccgcactgtttgcttcattgtctggggaacttctgcacatccatgtactttgtgccatttctgggctcacgtgtcactcctaatagagcctcttaaccaagactgctggattgcagctgcttgaggcaacacaggaggttagaacatgtcccgagggctctgaaacagtaggacatcctgggtgggtggagctggggagggcatgggcaggccagctggccgagctcctggctggctctcctgagtcctctggacatggcttgtccctgtgagactgtagctcttcaggacctgagctcttcccgttcttgacctgctcttgtgctgactgtgctgggctgatgggtaggcgcttgtccccagtgagtggctgtgtcctcagggtgcccctcttccagaccaactgcagcaaggcctggagcctgactctaggtgcagcccttgtggctggaatcccttgtgccacccaggggactcgggccctgctcctcctgcagcccctcctcacctgggctcgctgctggagtgaggtttttagggagcccagagcgtactcatctctgagctgctgggcccagctgcctggtgcatacctcttgcctcggtcctgtcccccagaacgctttatggagactgccgtgtcctccgagcactttgttttcacttcctgacccgtctcagaagctcaagtggttgaatgttttagcctcagaatctttttccccaagccctctcaggtggagccccgctgtaccagacaccacagcacagctctgtgaggctgtgtctcttcactctgtttctggggctgctgaggcccctgggaagccctggagcttgccagagcagagcgagaaagtctctggtcctgtttaaatgcctccgcgttttatctgtgagcaccaggctggagccactccctgtcttctcacagtgcccctgcaagttgcagcctcagttttccagtggctcgtggggtagcaggtgctgcgtcatatggtttgggacctctgtggctgcttccagcctgctaatagaacctctttccaccactgccttcatctttggggtggcacccctgagtgctcaggcctgagggcgctcctgtgtcctcactcgggacaggcagcctccactctgggagctcccatccctcgggatgcccaggagaggccatactttcagggtggcatggtgaattcaggggttaggatgggtaggtggtctttcagccccttctgcgttggggttggtttacagaacacctgtcctgcctgtgccagcctggccttctgcgagcaccccaggcacgctgtcctggaagttgtctgtctcctgcataggagggtctagagcagaccttgccctgggcctgtctgtgcgtgacttccatatgcttcattcgtgctcagccatggctgagcatgcgatggagagcacctggaccgcccctgacgtcgcaggccactgttcttatccagtgggccaagtgattgattgctagtggtggggttgattggaagaaaggaagtcgcagcccctgcccacggcttccccagctcgctggggttggaggactgtcatcagttgtccccagttaaagtccatttggaggaggttcagggtcccagtggctggatgtgcttgtggagggacacggtttgaggcaggggtttgcagaaggtgtagactgcatccattcttgggaggctgtggcacagggcagtgacaacttgggacaaatcaagacccgtccacactgcacctcagggacctcacctcacgccccacataaatgtgcttattggggggccgggtgtggtggcttctgcctgaaatcccagtactctggaaggccacggcaggaggatcactttagttcaggagtttgaaaccagcctgggcaacatagggagaccccatctctacagaaagtaaaagaaaatgagccaggtgtggtggcatgtgcctgtaaccccagctactcaggaggccgaggcgggaggatccccaagcccaggagtttgaggctgcagtgagttatggcctctgcactccagcctgggtgacagagtgagagacctaatctctaaaaacaaaaaataacaaaatgtgctttggggtcaggtgtggagatcagggtcggggaggtcatgaggtaggtaggggtcaggatgtggacagtcatgggctggtgggtgtggcagccgtgaggggtgggtggtggcctgggaggcagggcctgggcagggcttctgcacttctgctgcttacccagccccctctgggttcgaggactctccttgacaagggctgagctctcgggcactgcgttggactcagctgcctactgggaggctggggagaatggacctgtgagaccttgtttgtcctcttccctgcccagctcttgtagaccccaggcctggctgtccgcagggccaggagctgcagccatggcagccaccagcctcccacatgagccccagctcccagccccacacgcccactcctttgcccatgtggtgtcagctctggcctccgcttccacacatggaccctcagaccttgcacatctgttgtttcccttgcagggcagtgatgatgacatgaaatgaggtggggtcactcctgtttagggatgagactggggcccagggaggggcaggtgtgaagttgctgagggcagagggagacccagggctacctgctcctaatgaccagcctcacgttctccactgctcactccctgccgttcaccagctgcatgaccttgagcagtgcactcaactgtaaacagaggtgaaaacactcctttaccaactgttttaggggccactcttgtttgaggccttgaacctcctttcagttccgtggtggtcctgagcctctgaatctgggtatggcccctgctgggtcctggtctcttaggcagcacgatggcctccctgctcaaggccctgcacccaggggcagattgtgggaggcccactggccatggctgggccctatcgcagagagcctgtcagcacggccatttccacacccaggctggctgggaagcaagctacgaggtgctcaaaggccctctatgtctgcaggtagccccgtcccacacaggcgaggatcgttgggcctccttagtagccaaaggaactgaggtccagagcagggaatgtgttgcccagtgtcagcatggtctgctctggggtcaggcgtcttgccctggtcctaagccaccccaagccaaggcatgtccctgggcccatttcctctctcgaggtcttgggttccctatttctgatgtgtgtgaaaggaaggcctgtcttctggggtgaccatgaggctcagtgggaggagctgccaggcttgagctgggacttggcacctggccagccttttttctatttcattgtaccttgatgggctgtcagttctgaagagaaaaaatacactaggaatccattcttcctccaccattctccctggcagagggaagtgactacacccctatggtgtggacatactgacgctcctccatgaagcagcaaagttctgttgtttcaggagactgtgggccttgaggatgtggtagtgacctcaccagaggagttggcaattcctaagtgctgcctggaggcctctacagagacataatgttggagaacttctgccacatggcagtgctgggtaagacccctctgtccccaccagtgcccttgaggttatgggtgttggtaggtctgtggcctccatttccatgacgatggtgttaaggactgcatgtttgtgtccccccccaaagtttatatgttgaaaccctgacccccaggagggtggtattaggaggtggggcctttgggaggtgactaggcttaggtgagatcgtgagggtggggctcgccgatgagatcgagtccttataagaaaaggaaggaactagagcgaggtcactttgtgctgtgtgagcatacaagaaaactgccatcttcaagctgggtgcagtggctcacgcctgtaatcccagcactggaaggccaaggcattaggattgcatgagtccaggagttcgagaccagcctaggcatgataagaccttattgctaaaaaaaaaaaaaggaaataaaatagaaaattgccatctgcaaatgagaaagccttcagccgacaccagactgccagtgcctttgattttggactttcagtccccagatctgtgaaaaattaatttatgttgtttaagacacctagcctgtggtattttgttatcgcaatccaaactgactgagacaggcagtaaggagagaacagaggttccagcctgcttcaggtccaggcagttctgccattgcccctaactcctcagtgccagtcatgggccaggcccctgggggacttggaatgagtaaaacatgcacctattgttaaggttcacctggtccagaaggggaggcagacccacctgcccaccatgacccggacagaggcgataaatacggagcacctcatggccagggcctggaggattcccaccataccctacccagcgccaataacagagggaccctggagttgtgtacacaagatagcagttcagtgcttgcacacatactagttgagaagggaaatcagggctaatgaaacagctcaactgtctggcagagccaggctccttctgccatgatacagtttggatgtttgtccctttctaatcttatatggaaatttgatccccagtgttgaaggtggggcctggtgggagatgttcctgttatcgggatggatccttcatgaatagcctggtgccatctttgtggtaacaagtgagttctcacttgattagtttctgtgagaactgtttgttaaaaagagcctggtggcacctccctcccttcttcctccttctcttgctatgtgatgctgctgccctttgccttccgtcatgagtggaagctccctgaagcccccaccagaagcaaatgctggcaccatgctgcttgtacagcctgcagaactgtgagccaaataaacctcttttctttataaatta

SEQ ID NO: 474 - DNA, 1546 bp, Homo sapiens
taactgtccaccagaaaggactgctctttgggtgagttgaacttcttccattatagaaagaattgaaggctgagaaactcagcctctatcatgtggaacagctctgacgccaacttctcctgctaccatgagtctgtgctgggctatcgttatgttgcagttagctggggggtggtggtggctgtgacaggcaccgtgggcaatgtgctcaccctactggccttggccatccagcccaagctccgtacccgattcaacctgctcatagccaacctcacactggctgatctcctctactgcacgctccttcagcccttctctgtggacacctacctccacctgcactggcgcaccggtgccaccttctgcagggtatttgggctcctcctttttgcctccaattctgtctccatcctgaccctctgcctcatcgcactgggacgctacctcctcattgcccaccctaagctttttccccaagttttcagtgccaaggggatagtgctggcactggtgagcacctgggttgtgggcgtggccagctttgctcccctctggcctatttatatcctggtacctgtagtctgcacctgcagctttgaccgcatccgaggccggccttacaccaccatcctcatgggcatctactttgtgcttgggctcagcagtgttggcatcttctattgcctcatccaccgccaggtcaaacgagcagcacaggcactggaccaatacaagttgcgacaggcaagcatccactccaaccatgtggccaggactgatgaggccatgcctggtcgtttccaggagctggacagcaggttagcatcaggaggacccagtgaggggatttcatctgagccagtcagtgctgccaccacccagaccctggaaggggactcatcagaagtgggagaccagatcaacagcaagagagctaagcagatggcagagaaaagccctccagaagcatctgccaaagcccagccaattaaaggagccagaagagctccggattcttcatcggaatttgggaaggtgactcgaatgtgttttgctgtgttcctctgctttgccctgagctacatccccttcttgctgctcaacattctggatgccagagtccaggctccccgggtggtccacatgcttgctgccaacctcacctggctcaatggttgcatcaaccctgtgctctatgcagccatgaaccgccaattccgccaagcatatggctccattttaaaaagagggccccggagtttccataggctccattagaactgtgaccctagtcaccagaattcaggactgtctcctccaggaccaaagtggccaggtaataggagaataggtgaaataacacatgtgggcattttcacaacaatctctccccagcctcccaaatcaagtctctccatcacttgatcaatgtttcagccctagactgcccaaggagtattattaattattaataaatgaattctgtgcttttaaaaaaaaaaaaataaaaaaagaaaaaaaaaaaaaaaaaaaaaaaaaaaaa

SEQ ID NO: 475 - DNA, 10346 bp, Homo sapiens
agcactcggcgctgtcatggcggccgggagcagcttcagtgggcacacgacagccgcgcgacccgtggcggggcgagctgtggcagtagcatcctcaccactcgcagcagcctcagccgcggcgcccgtagcgccagcagcggctgcttttgcaaaggctgagcgcaggggcggggcgggccaggaagccatggagttctgtgcagccgcggactcccggggagcggactagggaaacttggaggctgcgaccagggtttggcgttgttgtcagcctcggggagagagattggacaaatattctccaagaggaggagggcgacgccaaggactttccacatcaactgctttggggtatctccacaagttggaagagggaccctttcgttttgcattgcgtgtgttgtgctcattaccagtgcagcgactgccgtcccagggtgactctgagttgtcctttatcgtgagctagcaatggctagcgaagacaatcgtgtcccttccccgccaccaacaggtgatgacgggggaggtggagggagagaagaaacccctactgaagggggtgcattgtctctgaaaccagggctccccatcaggggcatcagaatgaaatttgccgtgttgaccggtttggttgaagttggagaagtatccaatagggatattgtagaaactgtctttaacctgttggtaggaggacagtttgatctggaaatgaatttcattatccaagaaggtgagagtattaactgcatggtggacctactggaaaaatgtgacattacgtgccaagcagaagtctggagcatgtttacagccattctgaagaaaagcatacggaatcttcaagtctgcactgaagtaggccttgttgaaaaagtgcttgggaaaattgaaaaagttgacaatatgatagcagatcttttggttgacatgttgggagtgctggctagctataatttgacagttcgcgagctaaagcttttcttcagtaaacttcaaggagataaaggacgatggcctccacatgctgggaagttgctgtctgtgttaaagcatatgcctcagaagtatggtcctgatgccttttttaactttccaggaaagagtgctgcagctattgcattacctcctatagccaaatggccataccagaatggttttacatttcatacatggcttagaatggatcctgtaaataacatcaatgtagataaggataaaccatatttgtattgtttcagaaccagcaaaggtcttggctattctgctcattttgttggaggctgtttgattgtaacatcaataaagtcaaaaggaaaaggctttcaacactgtgtgaaatttgatttcaagccacaaaagtggtatatggttaccatagtacacatctataaccgatggaagaatagtgaacttcgatgttatgtgaatggtgagctggcttcctatggagagataacatggtttgtcaacactagcgatacctttgacaaatgtttcctgggctcatcagaaacagcagatgctaatagagtattctgtggtcagatgactgcagtttaccttttcagtgaagctctaaatgcagctcagatatttgctatttatcagttgggcctgggatacaagggtacatttaaattcaaagcagaaagcgaccttttccttgctgagcatcacaaacttttattgtacgatgggaaactctctagtgccattgcattcacgtacaatccacgggctacagatgcccagctttgtcttgaatcatctcctaaggacaacccttcaatttttgttcattcaccacatgcactcatgctccaggatgtaaaggcagttttaacacattccatccaaagtgcaatgcattcaattggaggagtacaagtactatttccactttttgcacagttggattacaggcaatatttgtctgatgagattgatttgactatatgttcaaccttgctggcctttatcatggaattgttgaagaactcaattgctatgcaggaacagatgcttgcctgtaagggcttcttggtaataggatatagccttgaaaagtcttccaaatctcatgttagcagagcagtacttgaactttgccttgcattttcaaaatatctgagtaatctgcagaatgggatgcccctgctcaagcaattgtgtgatcacgttcttcttaatcctgccatatggattcataccccagccaaggttcaactgatgctctatacttatctgtccacggaattcattggtacagtcaacatatataacaccattcggagagttggaacagtgcttctcatcatgcacacgctgaagtactactactgggcagtgaatcctcaggatcgaagtggtatcaccccaaaaggattagatggaccgcgacctaatcaaaaagaaatgctttctctacgagcattcttgttgatgttcattaagcaattagtgatgaaggattctggagtaaaggaagatgaattacaggccattcttaattacctactgactatgcatgaggatgacaatctaatggatgtcctacagctgcttgttgcattaatgtcagaacaccctaactctatgattcctgcttttgaccaaaggaatgggttacgtgttatctacaaacttctggcatcgaaaagtgaaggaatcagggtacaagctcttaaggcaatgggttattttttaaaacatctggccccaaagaggaaagcagaagtcatgcttggacatggattgttttcattgctagctgaaaggctcatgcttcagacaaatttaatcacaatgaccacatataatgtgctgtttgagattcttatagaacagattggtactcaggtgatacataaacagcatccagatcctgattcttcagtgaagatacaaaaccctcagatactaaaagtaattgcgaccctacttcgaaattctccccagtgcccagagagcatggaggttcgcagagcctttctttctgacatgattaaactttttaataacagtagagaaaacaggaggagcttgctacaatgctctgtgtggcaagaatggatgctttctctctgctattttaatcctaagaattcagatgagcaaaagataacagaaatggtatacgccatattcagaatcctgctttaccatgcagtcaaatatgagtggggtggctggcgtgtatgggtagacactttatcaatcactcattcaaaggtcacttttgaaatacacaaagaaaaccttgccaatatatttagggaacagcaaggaaaagttgatgaagaaatagggctgtgttcttcaacttcagttcaagcagcctctggcattagaagggatattaatgtttcagtaggatcccagcaaccagatacgaaggattctcctgtctgtcctcatttcaccacaaatggtaatgaaaattcaagtatagagaagacaagttcactagaatctgcatctaatattgaactgcaaactactaatacatcttatgaagaaatgaaagctgagcaagaaaatcaggagttaccagatgaaggcactttggaagaaacactgacaaatgagacaaggaatgcagatgatttagaagtatcttctgacataatagaagctgtggctatttcctctaattcttttataacaactggcaaagattcaatgactgtcagtgaagtaactgcttctataagttctccttcagaagaggatgcctcagagatgccagaattcttggataaatctatagtagaggaagaggaagatgatgattatgtggaactgaaagtagaaggcagtcctactgaggaagctaatctacccacagagctccaagataacagtttgtctccagctgcatctgaagccggtgaaaaactggacatgtttggtaatgatgacaaattaatatttcaagaaggaaaacctgttactgaaaagcaaactgatactgaaactcaagattctaaagattctggaattcagactatgacagcatcagggtcttcagctatgtcaccagaaactactgtttcccaaatagctgtagaatcagaccttggtcagatgctggaggaagggaagaaagcaactaacctcactagagaaaccaaattaattaatgattgtcatggtagtgtctctgaggcttcttctgagcaaaagattgcgaagttggatgtttccaatgttgctacagatactgagaggctggagttgaaggccagtcccaacgtggaagcacctcaacctcatcgacatgtgcttgagatatcaaggcaacatgagcagccagggcaaggaatagcaccagatgcagttaatggacaaaggagggattccagatctactgtgtttcgtattcctgagttcaactggtctcagatgcatcaacgtttgctcactgatctattattttcaatagaaacagatatacagatgtggagaagccattcaacaaagacagttatggacttcgtgaatagcagtgataatgtcatctttgtacacaacacaattcatctcatctctcaagtgatggacaatatggtcatggcttgtgggggtatactgccattgctttcagctgctacatcggctacacatgaactggaaaatattgaacctactcaaggcctttcaatagaagcctctgtgacatttttgcagaggctaattagccttgtggatgtgcttatatttgcaagttctcttggctttactgaaattgaagctgaaaaaagtatgtcatctggaggaattttgcggcagtgtctccgactagtttgtgcagtcgcagtaaggaattgcttggagtgtcaacagcattcacaactgaaaactaggggagataaagccttgaaaccaatgcatagccttattcctttagggaaatctgcagcgaagagcccagtggacattgtgactggcggtatatctccagtaagagatcttgacaggcttctacaggacatggatattaatcggcttagggcagttgttttcagagacatagaggatagcaaacaagctcaatttttagccttggcagtagtatactttatctctgttcttatggtctccaagtacagagacattttggaaccccaaaatgaaaggcatagccagtcatgtacagaaactggcagtgaaaatgagaatgtatcactctctgaaatcacaccagcagcattcagcactttaactacggcatcagtggaagaatctgaaagcacatcatctgctcgaaggagggactcaggcattggggaagaaacagccactggtttaggaagccatgtggaagtaactcctcacacagcacctcctggtgtcagtgcaggcccagatgcaatcagcgaggtgctatctactctttctttagaagtcaataagtctccggaaaccaaaaatgatagaggaaatgacttggacactaaggctacaccgtcagtttcagtttcaaaaaacgtcaatgtgaaagacattctccgaagcttggttaacataccagcagatggagtcacagtggatcctgcccttctgccaccagcctgccttggagcccttggtgatctatctgtggaacaacccgtgcagttcagatcttttgacagaagtgtcattgttgcagcaaaaaagtcagcagtctcaccttccacctttaatacaagcatacctaccaatgctgtcagtgtggtttcctcagtagattcagcccaagcctcagatatgggaggagaatcaccaggcagtagatcatctaatgcaaaattgccctcagttccaacagttgattcagtttcacaagatccggtttcaaatatgagtattacagagaggcttgaacacgctttggaaaaggcagctcctctccttcgtgagatttttgtggattttgcaccttttctttctcggacacttttgggtagccatggacaagaactgcttatagaaggaacaagtctggtttgcatgaagtcgagtagttcagttgtggaattggttatgctactgtgttctcaggagtggcaaaattctattcagaagaatgcaggccttgcttttatcgaacttgtcaatgaaggaaggttgcttagccagacaatgaaggatcatctagtaagagtagcaaatgaagctgaatttatcctgagcaggcagagagcagaagatattcacagacatgcggaatttgagtcactgtgtgcccagtattctgcagacaaacgagaagatgagaagatgtgtgatcatttgataagagcagcaaaatatcgtgaccacgtgacagcaactcaactaatccagaaaattatcaacattctcacagacaagcatggagcctggggaaattctgcagtgagtcgtcctcttgagttctggcgccttgactactgggaagatgacttgcggcgccggcgacgatttgtgcgtaaccctctaggatcgacacatcctgaagcgacactaaaaacagccgtggaacatgtgtgcatttttaaattgagagagaacagcaaagccacagatgaagatatccttgctaaaggaaaacagtccatcaggagtcaggctttaggaaatcagaactcagaaaacgagatcctcctggaaggcgatgatgatactctgtcatccgtggatgagaaagatttagagaatcttgccggtcctgttagcctgagcacaccagctcagcttgtggccccctctgttgtagtaaagggcactctttctgtcacctcctccgaactctattttgaggtggatgaagaggatcctaacttcaaaaaaatcgaccccaagatcttggcatatacagaagggctgcatggaaaatggctgttcacagagatacgatcaatcttttctcgtcgttatcttttgcaaaatacagccctggagatctttatggcaaacagagttgctgtgatgttcaacttcccagaccctgcaacagtaaagaaagtggttaactatctacctcgtgttggcgttggaacaagttttggattgcctcaaaccagacgtatttcattagctagtccacgtcagctttttaaggcttctaatatgacccagcgatggcaacacagagagatatctaattttgagtacttgatgtttctcaacacgatagcaggacggagttataatgacttaaatcagtatccagtgtttccttgggtcatcactaattatgaatcagaagaactggatcttaccttgcccaccaacttcagagatttgtccaagccaataggagctctgaacccaaaaagagcagcattcttcgctgagcgttatgaatcatgggaagatgatcaagttccaaagtttcactatggtactcattactcaactgcaagttttgttcttgcatggctgctaagaatagaaccctttacaacttatttcctaaatttgcaaggaggcaaatttgatcatgcagatcgaactttttcatcaatttccagagcttggcgaaacagtcagcgtgatacctctgatattaaggagttgatccctgaattttattatctccctgagatgtttgtcaacttcaataattataatcttggagtgatggatgatgggacagtagtgtctgatgtcgaacttcctccttgggccaaaacctcagaagaatttgttcacataaacagattggccctggagagtgaatttgtttcctgccagcttcaccaatggattgatctcatttttggctataaacagcaaggaccagaagctgtccgagccctcaatgtgttctattacttgacctatgaaggagctgtcaatctgaattcaataactgatcctgtgttgagagaggctgttgaagctcaaatccgaagttttggacagactccttctcaactactcatagagccccatcctcccagaggttctgccatgcaagtgagtccattgatgttcacagacaaagcccagcaggatgttatcatggtcctcaagtttccctccaactcccctgttactcacgtggcagccaacacccagcctggtttggcaactcccgctgtgatcacagtcactgctaacaggttatttgcggtgaacaaatggcacaaccttcctgctcatcaaggtgctgtacaagaccagccataccagctgccagtggaaatcgatcctctcatagccagcaatacaggaatgcacaggaggcaaatcactgaccttttagaccaaagtattcaagtgcattcccagtgctttgtcatcacttcagacaaccgctatattctcgtctgtggcttctgggataaaagtttcagagtctattctacagacacaggaagattgatccaagtggtgtttggccattgggatgtcgtcacttgccttgctcgttctgagtcatatattgggggaaattgctacattctctcagggtcacgtgatgcaactcttttgctgtggtattggaatggaaaatgcagtgggattggagataacccaggcagtgagactgctgctcctcgggccattttgaccggccatgactatgaggtcacatgtgctgcggtgtgtgcggagctaggcctggtgttgagtggttcacaagaaggaccatgtctcatacattccatgaatggagacttgttgaggaccttggagggtcctgaaaactgcctgaaaccaaaactcattcaggcttcaagagagggtcattgtgtcatattctatgaaaacggcctcttctgtacattcagtgtgaatggaaaactccaggccacgatggaaacagatgataacataagagccatccagctgagccgagatgggcagtacctgctcacaggaggagacagaggagtggtcgtggtccggcaggtgtcggacctcaagcagctctttgcctatccaggatgtgacgctggaatccgggccatggcgctgtcttacgaccagaggtgcatcatttctggcatggcttcaggaagcattgtgctattttacaacgactttaaccggtggcatcatgaataccaaacccgctactgatggtgacagctgtacatcaactctgcccctaggatgagcagaagtacctggagcatcattctcttctaccacatctgaatgtaacttaaatttgctcaaagaagcaaaatattttttaaagttattaataattgctatttttgtagtctttgcttgacttttttgggggggattagcaaagcagaaaactggctgctgggttctgtagttttaaaaaatctatatttttagtcataatgagaagtctattttcaccaattatggaaacatacagtggagcaagtaaaccacttattccagctataatattatgaagaacatttcccatgcatctacaagcttgagaaataggattttcacagtggggaagtgggttacaatattggaataggaaaatttgatgctgtaatttgggtcctgtatttttccaaacaactgtgcttcttcagcactaatatttctgggatttaaatagtaatgtttaaattatggtaaatgtaatttaaaacatctcaattaagtctgtctatcaatattgttcttcaagcatgttttagacctagaaaagtatggtttgggggaggctattttattgtgtggttagcacaaggaatctaatttatagcaagtgtgaaatagttaccattttttcctgatctgtcatcttcatagcacaacaaaacgaaatgatggaaatgctcttgagctcacaacatttgtttttcttttaaagtaaatgcaagtaccaaagctcactactgcggtttgcctgtgcctggacaatgaggcggagccactgttgttttgttggggcacccccttccctccccgggtttgcaaatagaggctaccgggtgctgtattcagcaacacctgttttactatttgttattaaactatcatctccaccttccttttgattagcaatttgtactaagaaacgaaacaatgttatttggtggtgtataattctacttttctagtagattactgtgtggaattctgtgaaaaatatttgagaaaaggcctgtattgcataaataaattctttgtatgttgtgaactttgatctctatttctcttgcaacagacttcaagtggtccctctttttttcctacacactcagctcttctctaaaagcaaggatttggaatgaacaattcagtttgacagaaaaagctgaataaaatggcatctgtaattgaattgttggaaatgccttttttgctcctaaattttaaacatcattaataaaataatgattcacaaagaaagaaaa

SEQ ID NO: 476 - DNA, 5831 bp, Homo sapiens; identical to SEQ ID NO: 154

SEQ ID NO: 477 - DNA, 1711 bp, Homo sapiens
ttcaaagaaacagcagcttttggacattttaatgagttctatgccaaaaccagaaagacatgctgagtcattgcttgacatttgtcatgatacaaactcttctccaactgatttgatgacagttaccaaaaatcaaaacatcatcttgcaaagcatcagcagaagtgaggagttcgaccaagatggtgactgcagtcattccacactggttaatgaagaagaagatcccagtggtggtagacaggactggcaacccaggacagaaggtgttgagatcactgtaacttttccaagagatgtcagtcctccccaagaaatgagccaagaagacttaaaagaaaagaatctgataaactcatcgcttcaagaatgggcacaagcacatgcagtttctcatccaaatgaaatagaaacggtggagctcaggaaaaagaagctgaccatgcggcccttagttttgcaaaaagaggaaagttccagggagctctgcaatgtgaacttgggctttttgctaccaagatcttgtttagaactgaacatttccaagtctgtaaccagagaagatgctcctcattttctgaaggagcagcaaagaaaatctgaagagttttcgacctctcatatgaagtacagtggccgaagcatcaagaggcatagtagtgggctcaggatatatgacagggaggagaaatttctcatctcaaatgaaaagaagatattttctgaaaatagtttaaagtctgaagaacctatcctatggaccaagggtgagattcttggaaagggagcctacggcacagtatactgtggtctcactagtcaaggacagctaatagctgtaaaacaggtggctttggatacctctaataaattagctgctgaaaaggaataccggaaactacaggaagaagtagatttgctcaaagcactgaaacatgtcaacattgtggcctatttggggacatgcttgcaagagaacactgtgagcattttcatggagtttgttcctggtggctcaatctctagtattataaaccgttttgggccattgcctgagatggtgttctgtaaatatacgaaacaaatacttcaaggtgttgcttatctccatgagaactgtgtggtacatcgcgatatcaaaggaaataatgttatgctcatgccaactggaataataaagctgattgactttggctgtgccaggcgtttggcctgggcaggtttaaatggcacccacagtgacatgcttaagtccatgcatgggactccatattggatggccccagaagtcatcaatgagtctggctatggacggaaatcagatatctggagcattggttgtactgtgtttgagatggctacagggaagcctccactggcttccatggacaggatggccgccatgttttacatcggagcacaccgagggctgatgcctcctttaccagaccacttctcagaaaatgcagcagactttgtgcgcatgtgcctgaccagggaccagcatgagcgaccttctgctctccagctcctgaagcactccttcttggagagaagtcactgaatatacatcaagactttcttcccagttccactgcagatgctcccttgcttaattgtggggaatgatggctaagggatctttgtttccccactgaaaattcagtctaacccagtttaagcagatcctatggagtcattaactgaaagt

SEQ ID NO: 478 - DNA, 1893 bp, Homo sapiens
gcgcagcgaggttccacgtgagcgcctgcgtttctcctcaaacctaacgatgccgccggagcggaggagacgaatgaaactggaccggagaaccggagcgaagccgaagcggaagcccggaatgaggccggactggaaagccggagcggggccaggcgggcctccccaaaagcctgccccttcatcccagcggaaaccgccggcccggccgagcgcggcggccgctgcgattgcagtcgcggcggcggaggaagagagacggctccggcagcggaaccgcctgaggctggaggaggacaaaccggccgtggagcggtgcttggaggagctggtcttcggcgacgtcgagaacgacgaggacgcgttgctgcggcgtctgcgaggcccgagggttcaagaacatgaagactcgggtgactcagaagtggagaatgaagcaaaaggtaattttccacctcaaaagaagccagtttgggtggatgaagaagatgaagatgaggaaatggttgacatgatgaacaatcggtttcggaaggatatgatgaaaaatgctagtgaaagtaaactttcgaaagacaaccttaaaaagagacttaaagaagaattccaacatgccatgggaggagtacctgcctgggcagagactactaagcggaaaacatcttcagatgatgaaagtgaagaggatgaagatgatttgttgcaaaggactgggaatttcatatccacatcaacttctcttccaagaggaatcttgaagatgaagaactgccagcatgcgaatgctgaacgtcctactgttgctcggatctcatctgtgcagttccatcccggtgcacagattgtgatggttgctggattagataatgctgtatcactatttcaggttgatgggaaaacaaatcctaaaattcagagcatctatttggaaaggtttccaatctttaaggcttgttttagtgctaatggggaagaagttttagccacgagtacccacagcaaggttctttatgtctatgacatgctggctggaaagttaattcctgtgcatcaagtgagaggtttgaaagagaagatagtgaggagctttgaagtctccccagatgggtccttcttgctcataaatggcattgctggatatttgcatttgctagcaatgaagaccaaagaactgattggaagcatgaaaattaatggaagggttgcagcatccacattctcttcagatagtaagaaagtatacgcctcttcgggggatggagaagtttatgtttgggatgtgaactcaaggaagtgccttaacagatttgttgatgaaggcagtttatatggattaagcattgccacatctaggaatggacagtatgttgcttgtggttctaattgtggagtggtaaatatatacaatcaagattcttgtctccaagaaacaaacccaaagccaataaaagctataatgaacttggttacaggtgttacttctctgaccttcaatcctactacagaaatcttggcaattgcttcagaaaaaatgaaagaagcagtcagattggttcatcttccttcctgtacagtattttcaaacttcccagtcattaaaaataagaatatttctcatgttcataccatggatttttctccgagaagtggatactttgccttggggaatgaaaagggcaaggccctgatgtataggttgcaccattactcagacttctaaagagactatttgaagtccagttgagtcacaagagaagcctgtcttgatatatcatctcagaaactttcctgaatatgtgataatatatggaaaatgatttatagatccagctgtgcttaagagccagtaatgtcttaataaacatgtggcagcttttgtttgaaaaaaaaaaa

SEQ ID NO: 479 - DNA, 1631 bp, Homo sapiens
gaagttgaaggggcgcagcgataccggtgcgcggcgctggcgtcgggcgcgtgacgtctttcctgcgcgccacctagcgtctctatcgcgccagttcctcagcctcagtgctatgaaggtgacagcgtgaggtgacccatctggcccgccgcgatgctggcaacacggcggctgctcggctggtcgcttcccgcgcgggtatctgtgcgtttcagcggcgacacgacagcacccaagaaaacctcatttggctcgctgaaggatgaagaccggattttcaccaacctgtacggccgccatgactggaggctgaaaggttccctgagtcgaggtgactggtacaagacaaaggagatcctgctgaaggggcccgactggatcctgggcgagatcaagacatcgggtttgaggggccgtggaggcgctggcttccccactggcctcaagtggagcttcatgaataagccctcagatggcaggcccaagtatctggtggtgaacgcagacgagggggagccgggcacctgcaaggaccgggagatcttacgccatgatcctcacaagctgctggaaggctgcctggtggggggccgggccatgggcgcccgcgctgcctatatctacatccgaggggaattctacaatgaggcctccaatctgcaggtggccatccgagaggcctatgaggcaggtctgattggcaagaatgcttgtggctctggctatgattttgacgtgtttgtggtgcgcggggctggggcctacatctgtggagaggagacagcgctcatcgagtccattgagggcaagcagggcaagccccgcctgaagccccccttccccgcagacgtgggagtgtttggctgccccacaactgtggccaacgtggagacagtggcagtgtcccccacaatctgccgccgtggaggtacctggtttgctggctttggcagagaacgcaactcaggcaccaaactattcaacatctctggccatgtcaaccacccttgcactgtggaggaggagatgtctgtgcccttgaaagaactgattgagaagcatgctgggggtgtcacgggcggctgggacaacctccttgctgtgatccctggcggctcgtctaccccactgatccccaagtctgtgtgtgagacggtgctgatggacttcgatgcgctggtgcaggcacagacaggcctgggcacagctgcggtgatcgtcatggaccgctcgacggacatcgtgaaagccatcgcccgcctcattgagttctataagcacgagagctgtggccagtgtaccccatgccgtgagggtgtggactggatgaacaaggtgatggcacgtttcgtgaggggggatgcccggccggccgagatcgactccctgtgggagatcagcaagcagatagaaggccatacgatttgtgctctgggtgacggggccgcctggcctgtgcagggtctgatccgccactttcggccggagctcgaggagcggatgcagcggtttgcccagcagcatcaggcccggcaggctgcctcttagcccaccaccctggcctgctgtcctgcgtctatccatgtggaatgctggacaataaagcgagtgctgcccaccctccagctgcc

SEQ ID NO: 480 - DNA, 3706 bp, Homo sapiens
agcgtctcgctccctgctcccggccccagagggttatcgcgagtcttggaataaacttgctcgtgcgatggccaaaaagaccaaagaaaacagagggacttttcccagttggtgatatggagcaagtgccatcagcaggcagactcgtgcagatcaccgtgacagagggatatgatttgaaaggttttaaaggagatactccagttacctttattcgagcagaattcaatcaagtggttctgggagactctgcaaaaattactgtttctccagaaggaagtgcaaaatacaacttcactagcagttttgagtttaatcctgaaggaggaatcacttcagatgacctcgctcacaaacctgtgttcttaactgtgactgaagttttaccaaaggaaaagaaacagaaagaagagaagaccttaattcttggtcaggctgtggtggaccttcttcccttactggaaggacagagttcatttcaaacaacagttccattgcaccctgtgcaaggctcacccttagaaactcctagatcaagtgctaagcagtgcagtcttgaagttaaagtattagtggcagagcctttactgaccacagcccagatctcagggggcaatctactgaaggtcacgttggaggctgcttactctgtgcctgaatccttcattccaacaggtcctgggcagaactacatggtcggtctgcaagttccatcacttggagagaaggactatcccattttatttaagaatggaactctgaagcttggaggggaaagggaacctgttccccggcccaaaaagtggccaattgccaacattctggctccaggagctaataacattcctgatgcattcattgttggtggtccctatgaagaagaagaaggagaactcaaccatcctgaggacagcgaatttaggaatcaagcagagtgcataaagaaaaggattatttgggacttggaaagtcgctgctaccttgatccttctgcagtggtcagttttcagaagcgaattgccgattgccggctttggcctgtagagatcacaagagttcctctggtcactatacccaaagggaaagctggcaaaactgaaaagactgatgaagaagctcagctttcgtttcatggtgtggcttatgttaatatggtcccattgttgtatccaggtgtgaagagaattcggggagcttttcatgtttacccttacctagacagtgtagtccatgaaaagaccaaatgtttattgagcttgttccgggatattggccatcacttgattcataataataaaataggaggaattaattctctgctgtccaaacaagctgtttctaagaatctgaaagaagataaaccagtgaaagaaaaggatatagatggaaggcctaggcctggggatgtgcaggcacctagtataaaatctcagagctcagatactcctttggaaggtgaaccccctctaagtcacaatcctgaaggacagcaatatgtagaagcagggacatacattgtgttggaaattcagttggacaaagccttggttccaaagcgaatgccagaggagctagccagaagggtcaaggaaatgattcctccaaggcctcctcttacccgtcggacaggaggagctcagaaggcagtgagtgactaccacatacagatcaagaatatttctagagccattctagatgaatactacagaatgtttggaaaacaggtggccaaactggagagtgatatggatagtgaaaccttggaggagcagaagtgccagctcagctatgaacttaattgctctggaaaatactttgctttcaaagaacaactcaagcatgctgtggtaaagattgtgagagataaatacttgaagacaacatcatttgaaagccaggaggaacttcagacatttatcagtgagctctatgtgttcttagtagatcagatgcatgtagccctaaaccagaccatgccagatgatgtccaaggcactgttgcaaccatttatacaagcagtgaacagcttcaactctttgcatttgaagcagaagtcaatgagaactttgagatggcagcagcatattataaagagagattggtccgtgagccccagaatctggatcactggttggactatggtgccttctgcctcctaactgaagacaacatcaaagcacaagagtgttttcagaaagccctttccctcaaccagagtcatatccacagcttgttgctgtgtggtgtcctggctgtcctgttggagaactatgagcaagcagaaattttctttgaggatgctacttgcttggaaccaactaatgttgtagcctggactttacttggtttgtactatgaaattcaaaacaatgatattcgaatggaaatggcatttcatgaggcctccaaacagcttcaggcacggatgcttcaggcacaagtaacaaagcaaaagagcactggtgtagaagacactgaggaaagagggaagagagaatctagtttaggcccttggggaatcacaaatggttctgcaacagcaatcaaggtggaagccccagcaggaccaggagctgcattatctattctagacaaatttcttgaagaatcctccaaactgcagtctgattcacaagaacccattttgactacacaaacttgggatccaagtataagccaaaaaccatctaacacatttatcaaggagataccaacaaagaaagaagcatcaaaatgtcaagattcatcagctcttctgcatcccggccttcattatggtgtttctcaaactaccaccatcttcatggagaccatacatttcttgatgaaagtcaaggctgtgcagtatgtgcacagagtgcttgcacatgagctgttatgccctcaaggaggccccagctgtgaatattacttggtgctggcccaaacacacattcttaagaagaactttgccaaggcagaggaataccttcaacaagcagcccagatggactacctgaaccccaatgtctggggcctgaagggccatctctattttctgagtggaaatcattctgaggccaaggcatgctatgaacgaaccattagctttgtagtggatgcttctgagatgcacttcatcttcctgagactggggctcatctatctggaagagaaagagtatgaaaaggcaaagaaaacctatatgcaagcctgtaagagatcaccttcatgccttacctggctaggactgggaatcgcctgctatcggctggaggagctcacagaggctgaggatgctctttctgaagccaatgcattgaacaactacaatgctgaagtatgggcatatctggctctggtctgcctgaaagttggacggcaattagaagctgagcaggcctacaagtacatgatcaagctgaaattgaaagatgaggctctgcttgcagagatccacacactacaggaaacagttggctttggaaatccatctttctgatacccctccagctgaacaattttctgcatgggactctgagttcctttccttcccagagagttttaccgtatgaagcctggagctggagaacgaaagaatcttcactataaacagagacccattcatttatttccattggctgtgttactggatgttttactggttgacgagaaactgggtcacaataaaaaaatggagatatgaaactcaaaaaaaaaaaaaaa

SEQ ID NO: 481 - DNA, 3419 bp, Homo sapiens
ccggcctcagggacgcaccggagccgcctttccgggcctcaggcggattctccggcgcggcccgccccgcccctcggactccccgggccgcccccggcccccattcgggccgggcctcgctgcggcggcgactgagccaggctgggccgcgtccctgagtcccagagtcggcgcggcgcggcaggggcagccttccaccacggggagcccagctgtcagccgcctcacaggaagatgctgcgtcggcggggcagccctggcatgggtgtgcatgtgggtgcagccctgggagcactgtggttctgcctcacaggagccctggaggtccaggtccctgaagacccagtggtggcactggtgggcaccgatgccaccctgtgctgctccttctcccctgagcctggcttcagcctggcacagctcaacctcatctggcagctgacagataccaaacagctggtgcacagctttgctgagggccaggaccagggcagcgcctatgccaaccgcacggccctcttcccggacctgctggcacagggcaacgcatccctgaggctgcagcgcgtgcgtgtggcggacgagggcagcttcacctgcttcgtgagcatccgggatttcggcagcgctgccgtcagcctgcaggtggccgctccctactcgaagcccagcatgaccctggagcccaacaaggacctgcggccaggggacacggtgaccatcacgtgctccagctaccagggctaccctgaggctgaggtgttctggcaggatgggcagggtgtgcccctgactggcaacgtgaccacgtcgcagatggccaacgagcagggcttgtttgatgtgcacagcatcctgcgggtggtgctgggtgcaaatggcacctacagctgcctggtgcgcaaccccgtgctgcagcaggatgcgcacagctctgtcaccatcacaccccagagaagccccacaggagccgtggaggtccaggtccctgaggacccggtggtggccctagtgggcaccgatgccaccctgcgctgctccttctcccccgagcctggcttcagcctggcacagctcaacctcatctggcagctgacagacaccaaacagctggtgcacagtttcaccgaaggccgggaccagggcagcgcctatgccaaccgcacggccctcttcccggacctgctggcacaaggcaatgcatccctgaggctgcagcgcgtgcgtgtggcggacgagggcagcttcacctgcttcgtgagcatccgggatttcggcagcgctgccgtcagcctgcaggtggccgctccctactcgaagcccagcatgaccctggagcccaacaaggacctgcggccaggggacacggtgaccatcacgtgctccagctaccggggctaccctgaggctgaggtgttctggcaggatgggcagggtgtgcccctgactggcaacgtgaccacgtcgcagatggccaacgagcagggcttgtttgatgtgcacagcgtcctgcgggtggtgctgggtgcgaatggcacctacagctgcctggtgcgcaaccccgtgctgcagcaggatgcgcacggctctgtcaccatcacagggcagcctatgacattccccccagaggccctgtgggtgaccgtggggctgtctgtctgtctcattgcactgctggtggccctggctttcgtgtgctggagaaagatcaaacagagctgtgaggaggagaatgcaggagctgaggaccaggatggggagggagaaggctccaagacagccctgcagcctctgaaacactctgacagcaaagaagatgatggacaagaaatagcctgaccatgaggaccagggagctgctacccctccctacagctcctaccctctggctgcaatggggctgcactgtgagccctgcccccaacagatgcatcctgctctgacaggtgggctccttctccaaaggatgcgatacacagaccactgtgcagccttatttctccaatggacatgattcccaagtcatcctgctgccttttttcttatagacacaatgaacagaccacccacaaccttagttctctaagtcatcctgcctgctgccttatttcacagtacatacatttcttagggacacagtacactgaccacatcaccaccctcttcttccagtgctgcgtggaccatctggctgccttttttctccaaaagatgcaatattcagactgactgaccccctgccttatttcaccaaagacacgatgcatagtcaccccggccttgtttctccaatggccgtgatacactagtgatcatgttcagccctgcttccacctgcatagaatcttttcttctcagacagggacagtgcggcctcaacatctcctggagtctagaagctgtttcctttcccctccttcctcctcttgctctagccttaatactggccttttccctccctgccccaagtgaagacagggcactctgcgcccaccacatgcacagctgtgcatggagacctgcaggtgcacgtgctggaacacgtgtggttcccccctggcccagcctcctctgcagtgcccctctcccctgcccatcctccccacggaagcatgtgctggtcacactggttctccaggggtctgtgatggggcccctgggggtcagcttctgtccctctgccttctcacctctttgttcctttcttttcatgtatccattcagttgatgtttattgagcaactacagatgtcagcactgtgttaggtgctgggggccctgcgtgggaagataaagttcctccctcaaggactccccatccagctgggagacagacaactaactacactgcaccctgcggtttgcagggggctcctgcctggctccctgctccacacctcctctgtggctcaaggcttcctggatacctcacccccatcccacccataattcttacccagagcatggggttggggcggaaacctggagagagggacatagcccctcgccacggctagagaatctggtggtgtccaaaatgtctgtccaggtgtgggcaggtgggcaggcaccaaggccctctggacctttcatagcagcagaaaaggcagagcctggggcagggcagggccaggaatgctttggggacaccgaggggactgccccccacccccaccatggtgctattctggggctggggcagtcttttcctggcttgcctctggccagctcctggcctctggtagagtgagacttcagacgttctgatgccttccggatgtcatctctccctgccccaggaatggaagatgtgaggacttctaatttaaatgtgggactcggagggattttgtaaactgggggtatattttggggaaaataaatgtctttgtaaaaagcttaaaaaaaaaaaaaaaaaa

SEQ ID NO: 482 - DNA, 1935 bp, Homo sapiens
ggagccccgaggggccggagctcctggcggtgccggatcctgacggcggccttcccccgggtctgtctgccaaaatgtctgaaagatcagatctccttcacttcaagtttgaaaattatggagattcaatgttacaaaaaatgaacaaattaagagaagagaataaattttgtgatgttacagttctcatagatgatattgaggtacagggacataaaattgtgtttgctgcaggttcccccttcttaagagaccaatttttactgaatgattccagagaggtgaaaatctccatattacagagttccgaagtggggagacaattgctcttatcctgttatagtggtgtgctggaattccctgagatggaactggtaaattacttgactgctgcaagttttcttcagatgagccacattgtagaacggtgcacacaggccctgtggaagtttataaagccaaaacaaccaatggatagtaaagagggatgtgaaccacagagtgcttctccccagtcaaaagaacagcagggagatgccagaggctccccaaagcaggactcaccttgtattcatccatctgaagacagtatggatatggaggacagtgatattcagattgttaaggtagaatctattggggatgtatcagaggttagaagtaaaaaagatcagaaccagtttatttcttctgaacccactgctttacattcatcagagccccagcactccctgataaattcaactgtggaaaacagagtaagtgaaatagaacaaaaccatctccacaattatgccctttcttatacaggcagtgataacatcatcatggcctcaaaagatgtctttggccctaatattcgaggtgtagacaaaggcctacagtggcatcaccagtgcccaaagtgtaccagggtgtttcgtcacctggagaactacgccaaccatttaaaaatgcacaaactctttatgtgtctactctgcggcaagactttcactcagaaaggcaaccttcatcgacacatgcgtgtgcatgccggaattaaacctttccagtgtaaaatctgtgggaaaaccttttctcagaagtgttccttacaggatcatcttaaccttcacagtggagataagccccataaatgtaactattgtgatatggtttttgcacataaaccagttttgaggaaacaccttaaacagctgcatggcaaaaacagctttgataatgccaatgagagaaatgtacaagacctcacagtggattttgattcttttgcatgtacaacagtcacagactctaaagggtgtcagccacaacccgatgcaacacaggtcctggatgcaggtaaactggcccaagctgtcctgaacttaagaaatgatagtacttgtgtgaattgagtaggggcttcatgctcacaactcgaactgactgacaatgtggcaatagtcttagtctttttaggagtgattttgctagtttgacttctccaaagcctctgtgtaggtggtagggagtgagtcaaagcactaatagaccaggcaacttaccacttggagtggatttgccttacttttgccctctcccattttctgttttgagttatttatcttgtaaagtctgttttcctttcccaaggaataattccttttgtctacctaacattgacttatgtcttagactgacactgttttaggcttttcactaggcacattccgaaggtaccaacaagttaataacatcacctactctccactaatagatgctatgctaagagaagtgaataatctttctttggtagaaaataggctgagatataaggtgatattgctattgacctgaaaatgtgatagaacttctggttgcctattgattattcctccatgtctgataaatgaatctgcttcctaaaaaaaaaaaaaaaaaaaaaaaaaa

SEQ ID NO: 483 - DNA, 2626 bp, Homo sapiens
gaattcctcgacactgttggcctactggatttatttgaaaggaatgaggatcctgcactcttcctccctcagtaagtaaatgccagtccctaggaagagagaaccaaaatgtctaccggaccagatgtcaaggctacagtgggggacatttccagtgatggcaatttaaacgtggctcaagaggaatgctccaggaaaggtttttgttcagtccgacatgggctggccctcatcttgcagctctgtaatttttcaatttacacccaacaaatgaacttgagcattgccattccagctatggtgaacaacacagccccacctagccagcccaatgcctccacagaacggccctccactgactcccagggctactggaatgaaactctaaaagaatttaaagcaatggcccctgcatatgactggagtcctgaaatccagggaatcatcctcagctccctcaactatggctcattcttggctccaatccccagtggctatgtggctggaatatttggagccaagtatgtggttggtgctggcttgtttatttcctcattcctgaccctcttcattccactggcagctaatgcgggagtggccttgctcattgtcctccggattgtacaaggcatagcccaggttatggtattaactggtcagtattcaatttgggtcaaatgggctcccccactggaaaggagtcaactcaccaccattgctggatcagggtcaatgctggggtccttcattgttctacttgctggtggtctcctctgccagaccataggatggccttacgtcttctatatctttggaggaattggctgtgcttgttgtcctctctggtttcctctcatttatgatgatcctgtgaatcatccctttatcagtgctggtgagaagagatacattgtgtgttcattggctcagcaggactgttcaccaggctggtctcttcccattagggctatgatcaaatccttaccactctgggccattttagtctcttatttctgtgaatactggcttttttataccattatggcgtacacaccaacgtacatcagctcggtacttcaagccaacctcagagatagtgggatcctgtctgccttgccgtttgttgttggatgtatctgcattatccttggaggtctactggcagactttcttctctccagaaaaatcctcagactcatcaccatcaggaaactcttcactgccattggggttctcttcccatccgtgatcctcgtgtccctgccctgggtcagatccagccacagcatgaccatgaccttcttggtgctgtcttctgccatcagcagcttctgtgaatcaggagcccttgttaacttcttggatattgctcctcggtacactggctttctcaaaggactattgcaagtctttgcacacatagctggagccatctctcctactgctgctggatttttcatcagtcaggattcagagtttggttggagaaatgtcttcttgctttcagctgctgttaacatatcgggcctggttttctacctcatctttggccgagcagatgtgcaggactgggctaaggagcagacattcacccacctctgagcaaaccgagagatgtgctagatcctggtgcttagttcatcattgttttccctcacagacatttctctttcatgcctgcttgactgataagccattagctagaccctgactatgtaacgctaaagattttaccatgcctggaaattttacaggggaagaaaacacgctagttatttaactgcaagctactaaaagcataggtgtgttgagatttctgtgttctccactcttccactgttatcctagtaaaagcatcaggggctggggacaatttctttccaaagcaaaagaggaagccagaccttgggaccgagaactgagaatcacaagggagttgcgcccaacatgcagaacatgaatcctctgagctgtcctcaaaagaaagccccaaacaacagaaagcatagtgttttccattgttggtgaaaaatgtcaaggaggaaagaacaataatgattccatcatgataagaggaatgaacgtgtctgcaactaatgggagcaagatagtacactttaactctttcagacaacttgcattctgtggatgccagctttggaatcagagccgcctctggaatacctgtgcttccagagttagcttttggacagttaccttctttctggccatcttgacttctgccccacatctgctttttggctttgtgcagatctttaacatgttagtgaacagacattgcccagtgtctcttctagcccctccaacagttcttcatgtagcactgcttttggacagtgacccatgatatctgccttcgtttgcccctctgactgttggaatcccacgcaccattcagtaggattcaattcaatgtggaaccattcaacattcacctcattaacctaaaatgtctcccaaagatgtatgtaagacacacactgccctaacctcacttcaaatgtctggagaaatgtgtgtagtgcttttgttaaagcccctatatgggcagcatggaggatcataagatagcaaaaccatttcaacactaaatgaatattaatgt

SEQ ID NO: 484 - DNA, 990 bp, Homo sapiens
gtctctctgggctctgtgtctaaggagccctagggcactgggtgtgagtcacttaggtgggcctgtgtggaggggtgtctggggaggacattgaacaggctgggctgaaagggcgttcggctgtcgggggaggtctctgggaagacaggttcctcacagcaaagcctgtggtgaaggtctcagaggcctctcaggggaagtctcaaggtctccagtaaggggaacgaggtctggagggaggaggttgtggatcctcaggcagggttgttgagggaggggggtctccaggtccccagaagcagggacctcaggcaggagtaccaggggaggagtgtggaggaagcgggctcctcagctgggggcctcggggtaggaaaggcctgggcccatcctgcccttgtggcccccggctgcagcctcagtggcatgggggtgaagcggagcctccagagtgggggcattctgctcagcctcgtggccaacgtcctcatggtgctctccacggccaccaactactggacccgccaacaagagggccacagtggcctgtggcaggaatgcaaccacggcatctgctccagcatcccctgccagaccacgctggcggtgactgtggcgtgcatggtgctggcggtgggtgtcggcgtggtgggcatggtgatgggactgcggattcggtgcgacgagggcgagtcgctgcggggccagaccacgagcgccttcctcttcctcggcggactgctgctgctgaccgccttgataggctacaccgtgaagaatgcgtggaagaacaacgtcttcttctcttggtcctatttttctgggtggctggccttacccttctcaattctcgcgggcttctgctttctgctggcagacatgatcatgcagagcaccgacgccatcagtggattccccgtgtgtctgtgactgcagcctgcctggggcagaataaaggaacggctttttttagcaaaaaaaaaaaaaaaa

SEQ ID NO: 485 - DNA, 669 bp, Homo sapiens
acttccctgggttcacagcaggggtggaactggattcttcctggatggggatccagatggaggtggagggttgatttgggaagcagagcacagcagcccaaatttgcttgtaatgtcggcgactacagcctgctggcctgccttcactgtcctgggggaagctcggggagaccaggtggactggagtagactgtacagagacactggtctggtgaagatgtccaggaaaccacgagcctccagcccattttccaacaaccacccatcaacaccaaagaggttcccaagacaacccaaaagggaaaagggacccgtcaaggaagttccaggaacaaaaggctctccctaaaagaccaccgcttcaaaaaaacctgaggaatggagtgggccaacactatccagccactctgaccagccgaaccaggaactcaatcaaaatgcgccacagcaggaccacaagggcaaggagaccaccgccttctccagtgcttccttgggcagccagtaattcccaggcaaggccagagacttcaagtctatctgaaaagtctccagaagtctaaccccagataaatagccaacagggtgtagagtacgttttacaccccaaagggtatgccccatggtgatagaaataaaatgaacatgttgtaaaatgaaaaaaaaaaa

SEQ ID NO: 486 - DNA, 4261 bp, Homo sapiens
ggagacgttggcggcagaggcggaggcggacggggtcagcccaaagcagaggctcggccatgaacttacccgggacagcggcggcggcggaccttttggccatcttctcgcagagtgctccctgctaacggggacagattttaacattatggcagggaggcatcagaatcgtagttttcctcttccaggagttcagtcaagtggtcaagtacatgcatttggaaattgttcagacagtgatattttggaggaggatgctgaagtgtatgaacttcgatccagaggaaaagagaaagtccgaagaagtacatcaagagatagacttgacgacattatagtattaacaaaagatatacaagaaggagatacattaaatgcaatagcccttcagtactgttgtacggtagcagatatcaagagagttaacaatctcatcagtgatcaagacttttttgcccttaggtctatcaaaattccagtaaaaaagttcagttccttgaccgaaacactttgtcctccaaaaggaagacagacttcacgtcattcatctgttcaatactcttccgaacaacaggaaattttgccagctaatgattctcttgcttacagtgactcagctggtagctttttaaaagaagtagaccgagacatagaacaaatagtaaagtgtacagacaataagagagagaacctcaatgaggtagtatcggccttaacagcacaacaaatgcgttttgaacctgataacaaaaacactcaacgtaaagacccctattatggagcagactggggaatagggtggtggacagctgtagtgataatgttgatagtaggtataataacaccagtgttttatttgttgtattatgaaattttagctaaggtggatgttagtcatcattcaacagtggactcttcacatttacattcaaaaatcacacccccatcacagcagagagaaatggaaaatggaattgtgccaactaaaggaatacatttcagccaacaagatgatcataaactgtatagtcaagattctcagtcacctgctgctcaacaggaaacatagcaattagctcataatcaaatgttagtggtcacatgtgcatctggaatgtggtgaatcagttatatccaataatagcttcaaaggcagaatttagagagattgaggatgcttttgtttttaacaaaagggtttcacactttgaaaattttttgagcaactagttgttgatgttgagagcagttgatccataaatctggtgtgtgaatgtttcaagcagaaattaatttaaatgtgtgtttaggaagtacttaacttggaagatgtatcatttttcttaaaatgcatgtttaaattttatttttttaagtaatttttaaaaagtttattaatgttaaatttatgatgcagaatgatagcatcagatgtctgcagctgaaaaaaatttactactatgaacccccaaaatattcagttgcaagaaaatttgattctaaaattattcatggtaggatacgtaacacaccccttcaaaacttttaaaaaatacatttagcacatgtgctatgaaagcatacgtacaaagagaaaggggaaagtgatttataattcctacaacagaggccaagaaatagattaaaatattttcaagaccccaaaataatgtattatggttgggaagtcagtagaacactggaataggtgaagacctgacagtaatttttgtcttaagaatgctttctttaggacagaccctttaacctcacctctgtgcatctgtttttaaaatgattatatttgcctctgatatttgaaagcacttttgtagttttgatgatgaaaaatatattaaacgtgcatattaccattatttaggaaataattccttatatactgtgataaatcattgctgttacatacagtaacatgccttaattacatttaatgccttactgctttatgtaagtaaatccaagtttcagaattaaaaataagcattatttcatatggtccaatcagattcgttacataggctatataaatttgtctccattttcaccatcaagcacaaataattgggtcaaaactgcctttgaggtctgttgaagaaaatggttcattaagcaaaaaagagtagaggtattttatattagcagtaacagacaaattatttagtaatcccttaacctctgtttttcaaagagaaaatatccaatttagacttttttcctgatctctatatatagcatcaaattgggaaacaaaggccaaaggtgtatagattgcttgaaagggggtggtagtgcctctttttaagatctgttgagtcggctacagtctggctaagtaagaagcatttgcatactgattccatcatttaatctttaaaagtatgtgttttaaaaatgtaaccagaatgattcttcaatagaaatgagatttggtggagtctggattgcctgttttgtatataatatatacttaagatatataataccacctcattttctgggcattatttcctaattgttgatgtttcaggcttttgataagtcattttatatatttcaaatttaactcagaataagtaaatatttatggcaaatgcagttttatgtactttcaggagaagaccatcaggaaaagacaggacaaagaagtcaaacattaaagcccttgcaaatattagaggaccttagacaattaccaaaaagtgtttaatagggaagttgcaaatgattctcttagtaaattaaacatttaaaaagtagttttaatgtgccttgggcatcttgaaaagaagagtgtgatataatttatgcttagtgttaactggtcattttacattgtatttattaagtctgctgaaaaatgaggttttaaggaagaaaatgcagattattttagggtaaacaggccaggtgtcctttgaagaactttgtttacatcaaattgatgaaattacagtcagtgattccttactttttttgctagttgtactttgaaattgttatgggttcgatttccaaaatatgtaacttattttttaaaggaataaggtgtgctgtgtatttgttgattaaaaatcatttgtcttgcagagtatccttttttgaaggaaatatacatccttataacacatcaggtagttttcttttttctgtatttaaattatatatttgaattaattgaatataatttgagttacatataattctatataaaggttacatattgaattatggttctaatctgtttaggaaagaaatgaattttctaagcatttaatacatttggaataattttagtttctaaaaagtactaatgtaagttaagtttatatcaaatgcaaattaccttgtataactaacaagcacagttattgtttaacattatggattttaattgtgttgacacccttctttgaatttgttgctttacatgtgtgtctgtgtgtgtgtctgcatgtgtgcacgcatgtacttgtatgcaatgtaaaagtaacagcagaatcattgcatttggtttacttaaaattttggagttagcaagtaaacaaaaagctgatagttttatgaagtctcggttaaaataaaatttctttgctatctcactcctaggaagttatggagttcatattttcaaaagatatgttaaaaatggttacacactctgctggccacattaaaaattagaagactcatgttaaattatctcctccaaaggactttttatttacagcttttcttttcctggactctacctgcttggttcagtgtcctgaagagttatttaaatgaaccactacttagtaattagttcttttttaaagtatctacttctaaaattacctagttgaaaatatgaaggatatgcttagttttagaaatatcatgaagcaaggatctagtcagtgttacagggtaaaggtggagttttttaaagtctgtatttaaatggtgcactgatggattcatttttaatttgcattacaaaaatgttgctcaggtaatcagtattttcttccacgtatgtgcatattgcactgttagatcatagaaatatctgaatgctttaatttttatgtatgcaaaatctataaatcttttgtataatgtattttatacaaatgtaactgtagaacattgttagcatgtgtatctgtaaaaccagtttttaaaattttttgccccttatttttcatattttgaaagatctccaacatgtaataaagtttctcttattcaatctaaa

SEQ ID NO: 487 - DNA, 4480 bp, Homo sapiens
gttgtttccggctcaactggggagctgctggagctcttctggcctctggttttccgactgcttatccgacgctcctccctctgtctctgtagctggagaaggtagtttccaggaaagttttccggtttgcaggccgcgcacatcgggcaggggccatcctcggtccccttgctcgttgctcgcagccccgttcggctacaagtgagtttcagggcgtcatggccaggggccaccgcggccagccgggtgtgaggctgcctttcgctgcccgcgcgctccagtggtctctgggtccgccggcgtccgtttcggcctgaacgcagcccctccgcggcgacgagcagtctcgcgccggagctcatggcctcggaggcgccgtccccgccgcggtcgccgccgccgcccacctcccccgagcctgagctggcccagctaaggcggaaggtggagaagttggaacgtgaactgcggagctgcaagcggcaggtgcgggagatcgagaagctgctgcatcacacagaacggctgtaccagaacgcagaaagcaacaaccaggagctccgcacgcaggtggaagaactcagtaaaatactccaacgtgggagaaatgaagataataaaaagtctgatgtagaagtacaaacagagaaccatgctccttggtcaatctcagattatttttatcagacgtactacaatgacgttagtcttccaaataaagtgactgaactgtcagatcaacaagatcaagctatcgaaacttctattttgaattctaaagaccatttacaagtagaaaatgatgcttaccctggtaccgatagaacagaaaatgttaaatatagacaagtggaccattttgcctcaaattcacaggagccagcatctgcattagcaacagaagatacctccttagaaggctcatcattagctgaaagtttgagagctgcagcagaagcggctgtatcacagactggatttagttatgatgaaaatactggactgtattttgaccacagcactggtttctattatgattctgaaaatcaactctattatgatccttccactggaatttattactattgtgatgtggaaagtggtcgttatcagtttcattctcgagtagatttgcaaccttatccgacttctagcacaaaacaaagtaaagataaaaaattgaagaagaaaagaaaagatccagattcttctgcaacaaatgaggaaaaggatttgaactcagaggatcaaaaagccttcagtgttgaacatacaagctgcaatgaggaagaaaatttcgcaaatatgaaaaagaaggccaaaataggcattcatcacaaaaatagtccccccaaagtcactgttccaactagtggaaatactatagagtctcctcttcatgaaaacatctctaattcaacatcatttaaagatgagaaaatcatggagactgatagtgaaccagaggaaggtgaaattacagactctcagactgaggatagttatgacgaagccattaccagtgaaggcaatgtaactgcagaagatagtgaggatgaagatgaagacaaaatttggcccccatgtattagagtaattgtcattagatcacctgtgttgcagataggatcactctttatcattactgctgtaaaccctgctacaattggaagagaaaaggatatggaacatactctccgaatccctgaagttggtgtcagtaagtttcatgcagaaatttattttgaccatgacttacaaagttatgtccttgtggatcaaggcagtcaaaatggcacaattgttaatggaaaacagattcttcagccgaaaactaaatgtgacccttacgtacttgagcatggagatgaagtcaaaattggagaaactgtcttatcctttcacattcatcctggcagtgatacctgtgatggctgtgaaccagggcaggttagagcccaccttcgccttgataagaaagatgaatcttttgttggtccaacactaagtaaggaggaaaaagagttggaaagaagaaaagaattaaagaaaatacgagtaaaatatggtttacagaatacagaatacgaagatgaaaagacattgaagaatccaaaatataaagatagagctggaaaacgtagggagcaggttggaagtgaaggaactttccaaagagatgatgctcctgcatctgttcattctgaaattactgatagcaacaaaggtcggaagatgttggagaagatgggttggaagaaaggagagggcctggggaaggatggtggaggaatgaaaacgccgatccagcttcagcttcggcgaacacatgcaggcttggggacaggcaaaccatcctcatttgaagatgttcaccttctccaaaacaagaacaaaaaaaactgggacaaagcacgagagcggtttactgaaaacttcccagaaactaagcctcaaaaagatgacccagggaccatgccttgggtaaaagggactttagagtgaaggctaatcatagaaaaaaaacctctagtttttttaaaaatagaatttggaaacttattttttctccccaaaagaatcagcagcacaggggaactatgtcacagtttacctcttcctgattcagaaatgtgtatggtttgcagcttttaaaaaccatttttttaaaactaataaatagtgactgaaccaatttatgcagtaaatagactaaagttcacagggcacggatgagtttatcaaacttcgttattttatcttgtcatttacaacatccatataagcaactagccatataagcaaaattcatagaactactaatgacttaagtgtacatctgttcttgtctccatatattcatgtaagatgcacaacaaaagaaacatcagaagtttataaaaataaatctgactatatgcatcctcatttattccctttagaacctaggtaaaaaatgttgcgaaaacatgggtagtggcgcatacattttgttatccttgaaatagcctaagtaatgttattgaagaactaatgaacaggtaacatattgtagaaaattagtctttcattgttttcttctgtgaagaatctgttgctatgtactgtatattcagcatttatatttggtttgtttcatagctaatgaggtatttagatatgaacaactgaatacatattgaaatagtgtgctggcttttgtagttttgataaagaccattgcaggcaatggaattgtgccagagaaatctgatttctagtacaaaaggaatacttagccagggcctcaagctcaagatacttattgaaaacatcctcaattgcaataaaaacattataacatgaaaaagagtgattttttgaaccggtgatttaaatgtattgatctgctttgaattttcaagcagccagaattttctagtttaaattggcagagttataacaaaggagagcctcaaatattagacaattgcagtgcggctttctgggcacaggtgtcactgctctgccacctatcactattctttttctgttcagtttttctctcaggtgtttgctgggaaattaacactggaactgacccttttctggcagtgaatgtaagctctagctcccccatctactataaagaaatgtcttcgagatgtagaaataaggaatattctgaaaataaaaattatacagtagtaaagataattcagaaagaaaaagctacctgttagaatttccagtctaaatggcacagggtagttacggagaaaaggggatggagaaggagaaactatgactaaagatgagaggtatgaacgagttgtcaggttcctatgggcttaagctaggacaatcaggccctaaactccaaatttggataaaatatctctttgcattcttcttggccacctgcatagtctgacacatacgtatgtacagttagacttgcaggctgcaggagtgccctgcattgttttcttttaattagaaataaaaagtattagtctaaatgtggttctggtgctggtgccctgtatatatgtaacaatataggacccctccaaataggttttgcttctggtgaatcttggtcattgggttagtatatgactgtctataatattttccatttgtattattatattggggaaaacattttttatcattttctattaagaaaatggaaaacttaaatatggtgttaaaaatggaaatatatgtgatatttgcattattaaacccctttgcagatctaaagtctcagggttccactattagtggttaaagtactgaataatgtctgggtctatttccatctgtaaaataagaatatttgtctcacgtgtctgtcatgaatagcaaatgagaaaatgtatataaaagcactttgtaaattgtaaaagtagtacagatgtgagcttctatttgtttagaagcataaatgtgaattatatacagtttgaattttgcataaaaaaaaaaaaaaaaa

SEQ ID NO: 488 - DNA, 2392 bp, Homo sapiens
agcggaccgacgcgacacgccgtgcgcctccgcggctgcgctacgaaaacgagtcccggagcggccccgcgcccgccgcacccggccctcgcccacccgaagacaggcgcccagctgccccgccgtctccccagctagcgcccggccgccgccgcctcgcgggccccgggcggaagggggcggggtcccgattcgccccgcccccgcggagggatacgcggcgccgcggcccaaaacccccgggcgaggcggccggggcgggtgaggcgctccgcctgctgctcgtctacgcggtccccgcgggccttccgggcccactgcgccgcgcggaccgcctcgggctcggacggccggtgtccccggcgcgccgctcgcccggatcggccgcggcttcggcgcctggggctcggggctccggggaggccgtcgcccgcgatgctgctctccaagttcggctccctggcgcacctctgcgggcccggcggcgtggaccacctcccggtgaagatcctgcagccagccaaggcggacaaggagagcttcgagaaggcgtaccaggtgggcgccgtgctgggtagcggcggcttcggcacggtctacgcgggtagccgcatcgccgacgggctcccggtggctgtgaagcacgtggtgaaggagcgggtgaccgagtggggcagcctgggcggcgcgaccgtgcccctggaggtggtgctgctgcgcaaggtgggcgcggcgggcggcgcgcgcggcgtcatccgcctgctggactggttcgagcggcccgacggcttcctgctggtgctggagcggcccgagccggcgcaggacctcttcgactttatcacggagcgcggcgccctggacgagccgctggcgcgccgcttcttcgcgcaggtgctggccgccgtgcgccactgccacagctgcggggtcgtgcaccgcgacattaaggacgaaaatctgcttgtggacctgcgctccggagagctcaagctcatcgacttcggttcgggtgcgctgctcaaggacacggtctacaccgacttcgacggcacccgagtgtacagccccccggagtggatccgctaccaccgctaccacgggcgctcggccaccgtgtggtcgctgggcgtgcttctctacgatatggtgtgtggggacatccccttcgagcaggacgaggagatcctccgaggccgcctgctcttccggaggagggtctctccagagtgccagcagctgatccggtggtgcctgtccctgcggccctcagagcggccgtcgctggatcagattgcggcccatccctggatgctgggggctgacgggggcgccccggagagctgtgacctgcggctgtgcaccctcgaccctgatgacgtggccagcaccacgtccagcagcgagagcttgtgaggagctgcacctgactgggagctaggggaccacctgccttggccagacctgggacgcccccagaccctgactttttcctgcgtgggccgtctcctcctgcggaagcagtgacctctgacccctggtgaccttcgctttgagtgccttttgaacgctggtcccgcgggacttggttttctcaagctctgtctgtccaaagacgctccggtcgaggtcccgcctgccctgggtggatacttgaaccccagacgcccctctgtgctgctgtgtccggaggcggccttcccatctgcctgcccacccggagctctttccgccggcgcagggtcccaagcccacctcccgccctcagtcctgcggtgtgcgtctgggcacgtcctgcacacacaatgcaagtcctggcctccgcgcccgcccgcccacgcgagccgtacccgccgccaactctgttatttatggtgtgaccccctggaggtgccctcggcccaccggggctatttattgtttaatttatttgttgaggttatttcctctgagcagtctgcctctcccaagccccaggggacagtggggaggcaggggagggggtggctgtggtccagggaccccaggccctgattcctgtgcctggcgtctgtcctggccccgcctgtcagaagatgaacatgtatagtggctaacttaaggggagtgggtgaccctgacacttccaggcactgtgcccagggtttgggttttaaattattgactttgtacagtctgcttgtgggctctgaaagctggggtggggccagagcctgagcgtttaatttattcagtacctgtgtttgtgtgaatgcggtgtgtgcaggcatcgcagatgggggttctttcagttcaaaagtgagatgtctggagatcatatttttttatacaggtatttcaattaaaatgtttttgtacataaaaaaaaaaaaaaaaaaaaaaaaaaaaaaaa

SEQ ID NO: 489 - DNA, 3286 bp, Homo sapiens
gcgtgtcgggcgcggaagggggaggcggcccggggcgcccgcgagtgaggcgcggggcggcgaagggagcgcgggtggcggcacttgctgccgcggccttggatgggctgggcccccctcgccgctccgcctcctccacacgcgcggcggccgcggcgagggggacgcgccgcccggggcccggcaccttcgggaaccccccggcccggagcctgcggcctgcgccgcctcggccgccgggagccccgtggagcccccgccgccgcgccgccccgcggaccggacgctgagggcactcggggcggggcgcgcgctcgggcagacgtttgcggggaggggggcgcctgccgggccccggcgaccaccttgggggtcgcgggccggctcggggggcgcccagtgcgggccctcgcgggcgccgggcagcgaccagccctgagcggagctgttggccgcggcgggaggcctcccggacgcccccagccccccgaacgctcgcccgggccggcgggagtcggcgccccccgggaggtccgctcggtcgtccgcggcggagcgtttgctcctgggacaggcggtgggaccggggcgtcgccggagacgcccccagcgaagttgggctctccaggtgtgggggtcccggggggtagcgacgtcgcggacccggcctgtgggatgggcggcccggagaagactgcgctcggccgtgttcatacttgtccgtgggcctgaggtccccggaggatgacctagcactgaaaagccccggccggcctccccagggtccccgaggacgaagttgaccctgaccgggccgtctcccagttctgaggcccgggtcccactggaactcgcgtctgagccgccgtcccggacccccggtgcccgccggtccgcagaccctgcaccgggcttggactcgcagccgggactgacgtgtagaacaatcgtttctgttggaagaagggtttttcccttccttttggggtttttgttgccttttttttttcttttttctttgtaaaattttggagaagggaagtcggaacacaaggaaggaccgctcacccgcggactcagggctggcggcgggactccaggaccctgggtccagcatggaggtggtggacccgcagcagctgggcatgttcacggagggcgagctgatgtcggtgggtatggacacgttcatccaccgcatcgactccaccgaggtcatctaccagccgcgccgcaagcgggccaagctcatcggcaagtacctgatgggggacctgctgggggaaggctcttacggcaaggtgaaggaggtgctggactcggagacgctgtgcaggagggccgtcaagatcctcaagaagaagaagttgcgaaggatccccaacggggaggccaacgtgaagaaggaaattcaactactgaggaggttacggcacaaaaatgtcatccagctggtggatgtgttatacaacgaagagaagcagaaaatgtatatggtgatggagtactgcgtgtgtggcatgcaggaaatgctggacagcgtgccggagaagcgtttcccagtgtgccaggcccacgggtacttctgtcagctgattgacggcctggagtacctgcatagccagggcattgtgcacaaggacatcaagccggggaacctgctgctcaccaccggtggcaccctcaaaatctccgacctgggcgtggccgaggcactgcacccgttcgcggcggacgacacctgccggaccagccagggctccccggctttccagccgcccgagattgccaacggcctggacaccttctccggcttcaaggtggacatctggtcggctggggtcaccctctacaacatcaccacgggtctgtaccccttcgaaggggacaacatctacaagttgtttgagaacatcgggaaggggagctacgccatcccgggcgactgtggccccccgctctctgacctgctgaaagggatgcttgagtacgaaccggccaagaggttctccatccggcagatccggcagcacagctggttccggaagaaacatcctccggctgaagcaccagtgcccatcccaccgagcccagacaccaaggaccggtggcgcagcatgactgtggtgccgtacttggaggacctgcacggcgcggacgaggacgaggacctcttcgacatcgaggatgacatcatctacactcaggacttcacggtgcccggacaggtcccagaagaggaggccagtcacaatggacagcgccggggcctccccaaggccgtgtgtatgaacggcacagaggcggcgcagctgagcaccaaatccagggcggagggccgggcccccaaccctgcccgcaaggcctgctccgccagcagcaagatccgccggctgtcggcctgcaagcagcagtgaggctggccgcctgcagcccgtgtccaggagccccgccaggtgcccgcgccaggccctcagtcttcctgccggttccgcccgccctcccggagaggtggccgccatgcttctgtgccgaccacgccccaggacctccggagcgccctgcagggccgggcagggggacagcagggaccgggcgcagccctcccccctcggccgcccggcagtgcacgcggcttgttgacttcgcagccccgggcggagccttcccgggcgggcgtgggaggagggaggcggcctccatgcactttatgtggagactactggccccgcccgtggcctcgtgctccgcagggcgcccagcgccgtccggcggccccgccgcagaccagctggcgggtgtggagaccaggctcctgaccccgccatgcatgcagcgccacctggaagccgcgcggccgctttggttttttgtttggttggttccattttctttttttctttttttttttaagaaaaaataaaaggtggatttgagctgtggctgtgaggggtgtttgggagctgctgggtggcaggggggctgtggggtcgggctcacgtcgcggccgcctttgcgctctcgggtcaccctgctttggcggcccggccggagggcaggaccctcacctctcccccaaggccactgcgctcttgggaccccagagaaaacccggagcaagcaggagtgtgcggtcaatatttatatcatccagaaaagaaaaacacgagaaacgccatcgcgggatggtgcagacgcggcggggactcggagggtgccgtgcgggcgaggccgcccaaatttggcaataaataaagcttgggaagcttggacctgaaaaaaaaaa

SEQ ID NO: 490 - DNA, 6251 bp, Homo sapiens
ctctgtcgccgctggagcagctgcggctcggggacccacagacacagccggggtcgggagccgcccggggcagggctcgggagagcgggccacaccatgaggccccagccccaccagaggccccgcgctgccctggcccccggtgcaccgtgctagcccccagccagggcgttggggagggcggtggccatggccagtcacgtggacctgctgacggagctgcagctgctggagaaggtgcccacgctggagcggctgcgggctgcccagaagcgccgggcccagcagctgaagaaatgggcacagtacgagcaggacttgcagcaccgcaagcgaaagcatgagcggaagcgcagcacgggcggccgccgcaagaaagtgtccttcgaggccagcgtggccctgctggaggcctcgctgaggaacgacgccgaggaagtacgctacttcctgaagaataaggtcagccctgatttgtgcaatgaggacggactcacagccctacaccagtgctgcatcgacaactttgaggaaattgtgaagctgctcctctcccatggtgccaatgtgaacgccaaggacaacgagctgtggacacctctccatgctgcagccacctgcggccacatcaacctggtgaagatcctcgttcagtatggggccgacttgcttgctgtcaactcggatgggaacatgccatatgacctctgcgaggatgaacccaccctggatgtcatcgagacctgcatggcataccagggcatcacccaagagaaaatcaacgagatgcgggtggctcctgagcagcagatgattgcggacatccactgcatgatcgcagcgggccaggacctggactggatagatgcccagggtgccacactgctgcacatagctggagccaatggatacctgcgggcagctgagctcctcctggaccatggagtgcgtgtggatgtgaaggactgggatggctgggagcccctgcatgcagctgccttctggggacagatgcagatggcagagctattggtgtcccatggagctagtctcagtgcaaggacatccatggatgagatgccaatagacctgtgcgaggaggaagagttcaaggtcctgctgctggagctaaaacacaagcatgatgtgatcatgaagtcacagctgaggcacaagtcatccttgagccggaggacctccagcgcaggcagccgtgggaaggtggtgcggcgagccagcctgtcggacaggaccaacctgtataggaaggagtatgagggagaggccatcctgtggcagcggagtgcagctgaggatcagcggacctccacctacaacggggacatcagggagaccaggacagaccaagagaataaggaccctaaccccaggctggagaagcccgtgctactctccgaatttcctaccaagatcccacgaggtgaactggacatgcctgttgagaatggcctccgggctccggtcagtgcctaccagtatgcgctggccaacggggatgtctggaaggtgcatgaggtgcctgactacagcatggcctatggcaaccctggcgtggccgacgccaccccgccctggagcagctacaaggaacagagccctcagacgcttctggagctgaagcggcagcgggctgcagccaagctgctcagccaccccttccttagcacacacctgggcagcagcatggccaggacgggcgagagtagcagtgaaggcaaggcccccttgatcggaggcagaacttcaccgtacagcagcaatgggacctcggtatattacacggtcaccagcggagatcccccactcttaaagttcaaggcccccatagaggagatggaggagaaggtgcatggctgttgccgtatctcctagtctccgtgtgatggaggagggagatgcctggggaggggctcctggaatccaggccagcccaacagccctggctggggaggtgtcagggcagctggggagaggtgggctctgcttttcagaggaactcagaccccagccctcagctggctgcccatagcatcccatgtcccacgtcccgtggttctgcttcctgctgcatcgtctgccatctgacacaaggcctgtcgtggcctcctggttcactctgctgtctgatcttgggagggtgggcttgagatcccagctctattcttggtataaaggcttctccggatcagtacatgcatgtcacattaacacacacacacacacacatatacacacacacacaagctcgatcagtgtgtgtaggaatgacatacctgggctcaggggaagcaagggggcttagaatttgtggggtattcccaaaaggatggaagttaagactcagagtctcattaccactgccaatgtggttttagcaggggaggggacctgctaagctgagacccatagtcctgctcagagttatcccaaagtctgagccaccagccacacctgacaggggtgagaagtcctcgctgtgttcagagggagccaggaatctacatgggtagatgagatagacacagacctgctccccgcagccttgttgagagccacacttctgcccatgccaggagccagctgtgtgaccatccaggggtggagggggaaaaccaggcaatttcgttcctggaatcaaccaaatcatgttttcctcttggatggaagtgtcaaaggcagaagggtgtgggagggggacaaggtcagtatttaccaaagtgtatctgattttaaaaattcctttagtctgtaaaactcctagagggagggaggtaactgaattcacttctttttgtggatcgtatcaaggtcactgggttttactggctggtgctgggaaaatgaagctaagtgaggagcttccattggaatgcttttccagggagagaggccagttaatttaaaaaaaacagtcgctagttaacagcgacagagcccagcaccctggggtctttgtgaatatccagactgtttcagcccagcccatctcagccaaccctccttagactgagctgtcagagcaagcaattaggggccagcctgcctccacctcccacccccttccacctccatcagtcatgtgtgcagagtcagtgctcgggatcccgggcccagcttttgcctttttggggatgcttggtgagacagatttgccagtcagcccttttgagttcccgcctcacccaggggctcccagcctgcacttgcaggagtggtgatgccccaagtctgcgaatccagggtgcacgtggtcaatatcccctcctgcattcaggagagccatggtagggctagagttgggtcttgcccagccctgcagtttcatagtcccagccttcctggtgctggggagggaggactgtgaatggctgttctcccctcactgctgagtctcccaggaccccctttggagatgcccatggcatgggcactgcccacaggctcagccagaacctcttggtgtacccgataagctgcaggttatcccttgctctgtgcgccttttatttgtccttaaactacctccttagagctctgaaggggtctcctagttccagattttaatttggggaacagatctgggttctttttaaccctcttctttctcagtctatgagaaacttgccctgaggggcacctgggctaggggcttgggactggaagaccatccccgccttgtgccacaactttggtcatgggatctgctctttgtcattcttagccccctactgtggcccccatagccccataacccagagagggagctggacttcagggagcctgagtgatgctttcccaggagcagggcagctggctggaccagaaagtagagggcccatgggagtgactgcacccttggtggctgctggaaggggagaggttctcagcatcaggccacctccaccccaatgccaggatagatgtattctagagtaggggtggaggcggcccaggaggctgaagacaggtgcacagatgcttcccacgaccttgccatttggggtgggctcttcaacatctcaggctgtggctggaacaggacaggatgatctaaaacacacgtaccattggctgtaaaacagtatgagcccagactgacgctgaaatccctcatgagccaaccttagctacaaggtagggagttctgagggaagccgcgtgctcctcaggagagagctgtttaggttttccgatctttttgctcaggggccaaacactgaaggcacgtactgcccaacccactgagcgcctgaggccattccctccttttccgcatgcctcctgcctcctgggctattcctctccacccagaaggctgggaatcccagctgattccctgacaggagccgacttcacacacaggtgactctcaggcattggctcatgttttcagccagggataaaccatcccttcttggggctttaagtccctggggagctttccctgtaggtctcctgggtgttgagagacaagttggagaccaacctccaatgaatgagccgcggtcattcattaattcactcacgtaatttactgagtagctgcaacatgccagcctctacgttaggttctgcggataaaggaggaataagacagagtcaggagaactgttccttgtggtttccgtcccttggggaccacaggcatcagcagtcccattcaagtcacctgaggcaaagtgtctgcatcttcgtccagcgaccctttgcttttcggctcctagaatccttagagtctgaattcctttagctgggaacagctgtcatggtcacccctggataacatttgccaccaagtatagatgctggatcttgggttccaggcagacatcatccaggtccatctggaactttcagtgatagctgccttcagccagcatctttgggggactctataatagcagcttgagatcagtgtctagaagactgttctgcaatttgctgccaaatgcatctcaggtttttaaagtcattgtttcttgctcatggtggctcatttattacatagtcccctcaccccactaatggataatgggaggaaaagttgctgcttccttcagcatcaaagcctttccttgggaatctgcctccctccatggcaggggtggattcgggagctgggagtaaccaggcaaagtcaaccagatgcctagctcctgctgagacccaggtcctatggcagctcctcattagattaaaggagaccacttccaaagcaggtgctgcatggctcaccatcatatgccccaaacaactgaaagttggcggttatcaccagactgtgagtttctggcaagtagcttggggaagctgaataaactctaggcccagggctactaaagacttcaggatagaattctccatcaaatatacagcataagtaaaactgctctgcactgtttaatccatttccaaggggcttagaaaagctaacaagggtgtgtcccctgtcctgccccaccggtttgctggctttgtaataacataagaccattgtggttgttggtgtcagataccttcccatcctgagctctctcacctacctgctctctctcctagagcaggatactggggtacttttaagaagggtgctccttttaagatgcccagaaaagctgtatttaactcttgctatttgtaacttggggatggtctcccctgccccagggcacataagagcaaaggctccaatggtcagtggatgactctgcaaaagtgaccccctgtgccagaagctatagccctctccccaacaggtctctcttgttggccagagggcctgcttcccatgggcattgcaagtgccaccgtgcggggcctggctctgcacacccaggaaaagtctgcagacccccagccctccgcaataattcaccagaccagaagccactggtgtacagagaacacttaaaaaaatgtattttatgtgaaaaaaaattaaaactctgtatactgtatcagcagctttgtgtaaaaatggcaatcaagagagtctaatatatttaaaacttttttaaaaaaaatcttcgcagatctttgatatcgtactgaggtaacttccacgtagccccttgccacgcggcaccggtgggccttgggtccaaaactgtggctcagccacatcccaaagggggcacatgtccctggagttgcttccagctgccaaggcctgtgacagaattcgctgttaagagtttttaattaaaattattaaattccttttaataaca

SEQ ID NO: 491 - DNA, 638 bp, Homo sapiens
ctgacaagatgtccctgtggactcccaaactctactccagatggggaggtgcccttaacaccaagattttaaaagctccaatttcagagcaagagtcgaaaactcacagataaagttatagttatttcagggttctgaaaagacgcagaacatgaagggactcagaagtctggcagcaacaaccttggctcttttcctggtgtttgttttcctgggaaactccagctgcgctccgcagagactgttggagagaaggaactggactcctcaagctatgctctacctgaaaggggcacagggtcgccgcttcatctccgaccagagccggagaaaggacctctccgaccggccactgccggaaagacgaagcccaaatccccaactactaactattccggaggcagcaaccatcttactggcgtcccttcagaaatcaccagaagatgaagaaaaaaactttgatcaaaccagattcctggaagacagtctgcttaactggtgaaaatatactggattatgtttaattatggttctattctctttgaaaacatgaaccatgtgaataaaacctttggaccctttttaaaaaaaaaaaaaaaaaaaaaaaaaaaaaaaaaaaaaaaaaaaaaaaaaaaaaa

SEQ ID NO: 492 - DNA, 2383 bp, Homo sapiens
tgtcctcccagctaccccctccctaagcaggctgaggaagaagagatagcaagccctcacctaacttgacccctttcttgtctctccccgctgctagcttctcccttctcgctgccttgcggggtggggaaacgtggaaggaattctgggaaaaccagatgtctgggttctctattcccgtctggcttgattctggacaaggggcttcctctccagggcctcggtttccccatctttaaaatggactgatagcatagacctgcccacctttcagaggtgcccgaagccttgacgagataacagatgagaagtggttttcgttgtgatgagccagctgaagcggttgcaccggagcgccagaccgtcagcggtgcagtggctctcgcgtccttcacatccccccacacccatcccgtggatgatgggggaaggcactactcctggggttccccgaagcggatcctgggactgggacctggggacgcggtgagaggcagccctgaagctgagtccagaggtctggggcgtcattgtcccagggcggacccagccccagaccctacaactaaacccaaggccagccgagaagcactaccactggcgggctgagctgagctctcattcttcttaggactctggacctttggaggaaatgaaagggacccagttggaaatatagtctttcttcgcgccccctacatctctctcccccggcggaaacgcggcccaaactgttacgaagtggaagaggctggatagctcttcataattaatcaggaatgggaggtttgagcaggtttacttgatgagggaaacattatagcctcgccaattcattcattatttcaacaattacttattgaacacctgctacgtggcagacagtaagagcctggatagtttctccccgtttttcaaagtcgctaaacgcgaccagagggcagaggagaggccggtaacctaagagtcctggctccgccccctccgcgtttggccttgcctgctcctcccaccaccacttcgctcagaggcggctactggctcaagaggacgacagaagccagtctctgatgcccaccgcattctccagcttcaggcctcaagccctgtagccgagaaggcgaggcctaatgttacaccaccggtctgttccgcctccgtttcggggtccacccgaaaagctttcagatcggatcctcggtgagacggcactcgattaaataggtctgtctctacaggccaaggaggcgggtttggtgcggccactccaaggccaaagcgagaaaatcttactgcgcacgcgcaatagacagccgatggagccaccgatggagccgtccggaggggagcaagagcccggagccgtcaggttcctggacctgccctgggaagacgtgctgctcccacacgtcctgaaccgggtcccgctgcgccagctgctccggctgcagcgcgttagccgggccttccggtcgctggtgcagcttcacctggccgggctgcgtcgcttcgatgccgcgcaggtgggtccgcagatcccgcgggccgcattggcccggctgctgcgggatgccgaggggctgcaggagctggcactggcgccgtgtcacgaatggctgtcagacgaggacctggtgccggtgctggcgcggaatccgcagctgcggagtgtggcgttgggcggctgcgggcaactgagtcgccgggcgcttggggctttggccgagggctgcccacgcctgcagcgcctgtcgctcgcgcactgtgactgggtggacgggctggcgctgcgcggcctcgctgatcgctgcccggccctggaggagctggatctcaccgcctgccgccagctcaaggacgaggccatcgtgtacctggcgcagaggcgcggcgctggtctccgcagcctctctctggccgtcaacgccaacgtgggggacgccgcggttcaagagttggctcggaactgcccagaactccaccaccttgacctcaccggctgcctccgcgtcggaagcgacggtgtcaggacattggccgagtactgccccgtgctgcgttcgctgcgggtgcggcactgccaccatgtggcggagtccagcctgagccgcttgcggaagcgcggcgtggacatcgacgtggagccgccgctgcaccaggccctggtgctgctgcaggatatggcgggcttcgcaccttttgtcaacctgcaggtctgacccgcctgccaatcggagcacagctggactgtgtggctggggcctgacactgagctgtagggaaactgaactgtgaggacctctggtgagaggccagtgccctgccccaccctggagcttcaaataaagagctttttacccccaaaaaaaaaaaaaaaaaaaaa

SEQ ID NO: 493 - DNA, 1556 bp, Homo sapiens
ggctaggtgcgctgcgagcgcgcggagccacgagggcggacggacgtaatgggcccgcctggccctgggcgccgcgccgcacgagcaccagcctagagccaggactgaagcttcaagatggctgaccaggaccctgcgggcatcagccccctccagcaaatggtggcctcaggcaccggggctgtggttacctctctcttcatgacacccctggacgtggtgaaggttcgcctgcagtctcagcggccctccatggccagcgagctgatgccttcctccagactgtggagcctctcctataccaaatggaagtgcctcctgtattgcaatggtgtcctggagcctctgtacctgtgcccaaatggtgcccgctgtgccacctggtttcaagaccctacccgcttcactggcaccatggatgccttcgtgaagatcgtgaggcacgagggcaccaggaccctctggagcggcctccccgccaccctggtgatgactgtgccagctaccgccatctacttcactgcctatgaccaactgaaggccttcctgtgtggtcgagccctgacctctgacctctacgcacccatggtggctggcgcgctggcccgcctgggcaccgtgactgtgatcagccccctggagcttatgcggacaaagctgcaggctcagcatgtgtcgtaccgggagctgggtgcctgtgttcgaactgcagtggctcagggtggctggcgctcactgtggctgggctggggccccactgcccttcgagatgtgcccttctcagccctgtactggttcaactatgagctggtgaagagctggctcaatgggttcaggccgaaggaccagacttctgtgggcatgagctttgtggctggtggcatctcagggacggtggctgcagtgctgactctaccctttgacgtggtaaagacccaacgccaggtcgctctgggagcgatggaggctgtgagagtgaaccccctgcatgtggactccacctggctgctgctgcggaggatccgggccgagtcgggcaccaagggactctttgcaggcttccttcctcggatcatcaaggctgccccctcctgtgccatcatgatcagcacctatgagttcggcaaaagcttcttccagaggctgaaccaggaccggcttctgggcggctgaaaggggcaaggaggcaaggaccccgtctctcccacggatggggagagggcaggaggagacccagccaagtgccttttcctcagcactgagggagggggcttgtttcccttccctcccggcgacaagctccagggcagggctgtccctctgggcggcccagcacttcctcagacacaacttcttcctgctgctccagtcgtggggatcatcacttacccaccccccaagttcaagaccaaatcttccagctgcccccttcgtgtttccctgtgtttgctgtagctgggcatgtctccaggaaccaagaagccctcagcctggtgtagtctccctgacccttgttaattccttaagtctaaagatgatgaacttcaaaaaaaaaa

SEQ ID NO: 494 - DNA, 2794 bp, Homo sapiens
cggcaggaccgagcgcggcaggcggctggcccagcgcagccagcgcggcccgaaggacgggagcaggcggccgagcaccgagcgctgggcaccgggcaccgagcggcggcggcacgcgaggcccggccccgagcagcgcccccgcccgccgcggcctccagcccggccccgcccagcgccggcccgcggggatgcggagcggcgggcgccggaggccgcggcccggctaggcccgcgctcgcgcccggacgcggcggcccgaggctgtggccaggccagctgggctcggggagcgccagcctgagaggagcgcgtgagcgtcgcgggagcctcgggcaccatgagcgacgtggctattgtgaaggagggttggctgcacaaacgaggggagtacatcaagacctggcggccacgctacttcctcctcaagaatgatggcaccttcattggctacaaggagcggccgcaggatgtggaccaacgtgaggctcccctcaacaacttctctgtggcgcagtgccagctgatgaagacggagcggccccggcccaacaccttcatcatccgctgcctgcagtggaccactgtcatcgaacgcaccttccatgtggagactcctgaggagcgggaggagtggacaaccgccatccagactgtggctgacggcctcaagaagcaggaggaggaggagatggacttccggtcgggctcacccagtgacaactcaggggctgaagagatggaggtgtccctggccaagcccaagcaccgcgtgaccatgaacgagtttgagtacctgaagctgctgggcaagggcactttcggcaaggtgatcctggtgaaggagaaggccacaggccgctactacgccatgaagatcctcaagaaggaagtcatcgtggccaaggacgaggtggcccacacactcaccgagaaccgcgtcctgcagaactccaggcaccccttcctcacagccctgaagtactctttccagacccacgaccgcctctgctttgtcatggagtacgccaacgggggcgagctgttcttccacctgtcccgggagcgtgtgttctccgaggaccgggcccgcttctatggcgctgagattgtgtcagccctggactacctgcactcggagaagaacgtggtgtaccgggacctcaagctggagaacctcatgctggacaaggacgggcacattaagatcacagacttcgggctgtgcaaggaggggatcaaggacggtgccaccatgaagaccttttgcggcacacctgagtacctggcccccgaggtgctggaggacaatgactacggccgtgcagtggactggtgggggctgggcgtggtcatgtacgagatgatgtgcggtcgcctgcccttctacaaccaggaccatgagaagctttttgagctcatcctcatggaggagatccgcttcccgcgcacgcttggtcccgaggccaagtccttgctttcagggctgctcaagaaggaccccaagcagaggcttggcgggggctccgaggacgccaaggagatcatgcagcatcgcttctttgccggtatcgtgtggcagcacgtgtacgagaagaagctcagcccacccttcaagccccaggtcacgtcggagactgacaccaggtattttgatgaggagttcacggcccagatgatcaccatcacaccacctgaccaagatgacagcatggagtgtgtggacagcgagcgcaggccccacttcccccagttctcctactcggccagcggcacggcctgaggcggcggtggactgcgctggacgatagcttggagggatggagaggcggcctcgtgccatgatctgtatttaatggtttttatttctcgggtgcatttgagagaagccacgctgtcctctcgagcccagatggaaagacgtttttgtgctgtgggcagcaccctcccccgcagcggggtagggaagaaaactatcctgcgggttttaatttatttcatccagtttgttctccgggtgtggcctcagccctcagaacaatccgattcacgtagggaaatgttaaggacttctgcagctatgcgcaatgtggcattggggggccgggcaggtcctgcccatgtgtcccctcactctgtcagccagccgccctgggctgtctgtcaccagctatctgtcatctctctggggccctgggcctcagttcaacctggtggcaccagatgcaacctcactatggtatgctggccagcaccctctcctgggggtggcaggcacacagcagccccccagcactaaggccgtgtctctgaggacgtcatcggaggctgggcccctgggatgggaccagggatgggggatgggccagggtttacccagtgggacagaggagcaaggtttaaatttgttattgtgtattatgttgttcaaatgcattttgggggtttttaatctttgtgacaggaaagccctcccccttccccttctgtgtcacagttcttggtgactgtcccaccgggagcctccccctcagatgatctctccacggtagcacttgaccttttcgacgcttaacctttccgctgtcgccccaggccctccctgactccctgtgggggtggccatccctgggcccctccacgcctcctggccagacgctgccgctgccgctgcaccacggcgtttttttacaacattcaactttagtatttttactattataatataatatggaaccttccctccaaattcttcaataaaagttgcttttcaaaaaaaaaaaaaaaaaaaaaa

SEQ ID NO: 495 - DNA, 3101 bp, Homo sapiens
acactctggcccggttctcggtggtgcgggagcgggcgggagcagcggccgctctggtcggcggacgtgctgccgagtagtcccggaagcgaagcagcgatggcggagagtccgactgaggaggcggcaacggcgggcgccggggcggcgggccccggggcgagcagcgttgctggtgttgttggcgttagcggcagcggcggcgggttcgggccgcctttcctgccggatgtgtgggcggcggcggcggcagcgggcggggccgggggcccggggagcggcctggctccgctgcccgggctcccgccctcagccgctgcccacggggccgcgctgcttagccactgggaccccacgctcagctccgactgggacggcgagcgcaccgcgccgcagtgtctactccggatcaagcgggatatcatgtccatttataaggagcctcctccaggaatgttcgttgtacctgatactgttgacatgactaagattcatgcattgatcacaggcccatttgacactccttatgaagggggtttcttcctgttcgtgtttcggtgtccgcccgactatcccatccacccacctcgggtcaaactgatgacaacgggcaataacacagtgaggtttaaccccaacttctaccgcaatgggaaagtctgcttgagtattctaggtacatggactggacctgcctggagcccagcccagagcatctcctcagtgctcatctctatccagtccctgatgactgagaacccctatcacaatgagcccggctttgaacaggagagacatccaggagacagcaaaaactataatgaatgtatccggcacgagaccatcagagttgcagtctgtgacatgatggaaggaaagtgtccctgtcctgaacccctacgaggggtgatggagaagtcctttctggagtattacgacttctacgaggtggcctgcaaagatcgcctgcaccttcaaggccaaactatgcaggacccttttggagagaagcggggccactttgactaccagtccctcttgatgcgcctgggactgatacgtcagaaagtgctggagaggctccataatgagaatgcagaaatggactctgatagcagttcatctgggacagagacagaccttcatgggagcctgagggtttagaccctgctcccatctccccttcccccactcaagagtcccagcagaatcccttccccccaccccagggatggagaggcactgtgtatctccctccagactcgaagtcatcctgcaagatggcaagaaccaagcaagctccgatcccagggtgtgggagtgggggcctgttcccggtctgacctccttggcactggagcatctggggcttcgttcatccattcatcccgtatcaggggccaaggtacctttacaggagcacctagagcgagggcctttggcaaaaacaaaacaaccaacacacctctccacagggccagctccttagggataagtggaagatggaaattgcaattccaagagggagtgtgcccaaatgatttatggggatacctggaagggagcttggggtgggggctgtctgtgacacttaagcagtctgggtggttgtctatttgtctgtcttcagtcttgaagcagggcttcccaatgcccttttcctccctgccttccttcccccattatttcccacaggccagcataattttgtttttcctaatttatagtcactgttctagacagaccaaagagaaggaacagtggtggagtctaggctgctgatcagtaagctttacctagcacctgagcacctttctcccctcccctctttcctcacccttttctagatgtaagacagaaagtaaatgtgactgggacttaaccaaggtcttggtaaagcctgcatggcaccgtaagaagctgaaaatactgtttgttcccgcaatcactgatttgaaaagttcccaacacaggcagctgctgtgtatatgggattagagccactacatagaatagtctcttacagattttcataaatactagtcacaataagggtatttttcttgggggtggagtaagggggagactgatgctagtccttgttgtattttgttgggctgtccttgtgtattttcaccccagcctgtagtcctcctcacttcaaccccagggatttttggggagcaagggtagccaatggcagagggggttggggctgggactctggaggctcctccccttctttctcttccttccgcctcccccgtgcccccagctgctcttgtcactgtctctgatgggtatttgcctggctttgttgcttctctatctgtatttagctgcagtgatcctttagctggttggctcagaaaaaaaaaaatgtgctttaggtgccctgtaatcctgggcatcaagggaatccatccttcccctttttgatatgttctccccgtacttccagatttattgttatggctcccagtgggtattggcgattcttgtgatgcagggcctcagtcagtgtccagccatgcataagggagaggatagtgtgtacctgccctgccctctgctatgaaggtctctgccttgtggatcatgggactccccttggaggatctgtgcaaaggggggctgggcacaaaggagaatgtcctatttgggagggcaggaagcaaaggaactggacagggattggtgggcttggggaacggaagtttatcttggatacccttgaagaggctgggtctcttcacatgaagatcgaaaagggaccctgcttccaatttccctcttccattcctcgagctactccagggcttagaagaatgctcttggtctgtgggtccagtgttgtctgtcatccatttaagtgttcccactttcaagtgacaatcctctccttggccctgccatagggcagagcatgtctggcatagcagcctgacttttatgccctaatcttgagttgaggaaatatatgcacaggagtcaaagagatgtctttatatctgactgtatataaatgaagtttttttgttttttttgttttcctttttggtgcaataaagtttgttttggcagaaggagaaaaaaaaaaa

SEQ ID NO: 496 - DNA, 1483 bp, Homo sapiens
gacacagtagaaataacactttataagcctcttcctcctcccatctcctggcctccttccatcctcctctgcccagactccgcccctcccagacggtcctcacttctcttttccctagactgcagccagcggagcccgcagccggcccgagccaggaacccaggtccggagcctcaacttcaggatgttgacaacattgctgccgatactgctgctgtctggctgggccttttgtagccaagacgcctcagatggcctccaaagacttcatatgctccagatctcctacttccgcgacccctatcacgtgtggtaccagggcaacgcgtcgctggggggacacctaacgcacgtgctggaaggcccagacaccaacaccacgatcattcagctgcagcccttgcaggagcccgagagctgggcgcgcacgcagagtggcctgcagtcctacctgctccagttccacggcctcgtgcgcctggtgcaccaggagcggaccttggcctttcctctgaccatccgctgcttcctgggctgtgagctgcctcccgagggctctagagcccatgtcttcttcgaagtggctgtgaatgggagctcctttgtgagtttccggccggagagagccttgtggcaggcagacacccaggtcacctccggagtggtcaccttcaccctgcagcagctcaatgcctacaaccgcactcggtatgaactgcgggaattcctggaggacacctgtgtgcagtatgtgcagaaacatatttccgcggaaaacacgaaagggagccaaacaagccgctcctacacttcgctggtcctgggcgtcctggtgggcagtttcatcattgctggtgtggctgtaggcatcttcctgtgcacaggtggacggcgatgttaattactctccagccccctcagaaggggctggattgatggaggctggcaagggaaagtttcagctcactgtgaagccagactccccaactgaaacaccagaaggtttggagtgacagctcctttcttctcccacatctgcccactgaagatttgagggaggggagatggagaggagaggtggacaaagtacttggtttgctaagaacctaagaacgtgtatgctttgctgaattagtctgataagtgaatgtttatctatctttgtggaaaacagataatggagttggggcaggaagcctatggcccatcctccaaagacagacagaatcacctgaggcgttcaaaagatataaccaaataaacaagtcatccacaatcaaaatacaacattcaatacttccaggtgtgtcagacttgggatgggacgctgatataatagggtagaaagaagtaacacgaagaagtggtggaaatgtaaaatccaagtcatatggcagtgatcaattattaatcaattaataatattaataaatttcttatatttaaggcaaaaaaaaaataaaaaaaaaaaaaaaaaaaaaaa

SEQ ID NO: 497 - DNA, 10906 bp, Homo sapiens
attggtggaggcggcaagtttaaacagagtcaaaacgccatacttgtttggctcctctttttaatttgcgagtttattgggcttgttttctgttttctagggagtaggttagtggaaaagaaaaagggccgaattcactcccacgacctctacagccgcccctgaggggaagcggtcagcgtaagtcccggatccccgctccggagccgcctcgtgggagcggggcaaggagatccaggaggggtctcgaatctgccatggcgaaccggcgagtggggcgaggctgctgggaagtgagcccgaccgagcggaggccgcccgcggggctgcggggccccgcggccgaggaggaggcgtcttccccgccggtcctgtctctcagccacttctgcaggtctcctttcctttgcttcggggacgttctcctgggagcctcacggacgctgtctctggccctagacaaccctaacgaggaggtggcagaagtgaagatctcccacttcccggccgcggacctgggcttcagtgtgtcgcagcgctgtttcgtgttgcagcctaaagagaaaattgttatttctgttaactggacaccactcaaagaaggccgagtaagagagattatgacatttcttgtaaatgatgttctgaaacaccaagctatattactaggaaatgcagaagagcagaaaaagaaaaagaggagtctttgggataccattaaaaagaagaaaatttcagcctctacaagtcacaacagaagggtttcaaatattcagaatgttaataaaacatttagtgtttcccaaaaagttgacagagttaggagcccactacaagcttgtgaaaacttggctatgaatgaaggcggtcccccaacagaaaacaattctttaatacttgaagaaaataaaatacccatatcacctattagccctgctttcaatgaatgccatggtgcaacttgcttgccactctctgtacgtcgatctactacctactcatctcttcatgcatcagaaaatagggaactattaaatgtacacagtgccaacgtttcaaaagtttcttttaatgagaaagctgtaactgaaacttcctttaattccgtaaatgttaatggccaaagaggagagaatagtaaacttagtcttacccccaactgttcttcaactttgaacattacacaaagccaaatacattttctaagtccagattcttttgtaaataatagtcatggagctaataatgaactagaattagtaacatgtctttcatcagatatgtttatgaaagataattcacagcctgtgcatttggaatcaacaattgcacatgaaatttatcagaaaattttaagtccagattctttcataaaagataattatggactaaatcaggatctagaatcagagtcagttaatcctattttatcccctaatcaatttttaaaagataacatggcatatatgtgtacatctcagcaaacatgtaaagtaccattatcaaatgaaaattctcaagtcccacagtctcctgaagattggagaaaaagtgaagtttcgccacgtattcctgaatgtcagggttcaaaatctcccaaagctatttttgaagaactagtagaaatgaagtcaaattactacagttttataaaacaaaataatcctaaattttctgcagttcaggatatttctagtcatagccacaataaacaacctaagagacgtccaatactttctgccactgttactaaaaggaaggccacctgtaccagagaaaaccaaactgagattaataaaccaaaagcaaaaagatgtctcaacagtgcagtgggtgaacatgaaaaagtaataaataatcaaaaggaaaaagaagattttcattcttatcttccaattatagatccaatattaagtaaatctaagagttataaaaacgaggtaacaccctcttcgacaacagcttcagttgctcggaaaagaaagagcgatggaagcatggaagatgcaaatgtgagagttgcaattacagaacatacagaagtgcgagaaatcaaaagaatccatttttctccctcagagcctaaaacatcagctgttaagaaaacaaaaaatgtgacaacacccatctcaaaacgtattagcaacagagagaaattaaacctgaagaagaaaactgatttatcaatattcagaactccaatttctaaaacaaacaaaaggacaaaacccattatcgctgtggcacagtccagtttgaccttcataaaaccattaaaaacagatattcccagacacccgatgccatttgctgcaaaaaacatgttttatgatgaacgctggaaggaaaagcaggaacagggcttcacttggtggttaaattttatattaacccctgatgacttcactgtaaaaacaaatatttctgaagtaaatgctgctactcttcttttgggaatagagaatcaacataaaataagtgttcctagagcacctacaaaagaggaaatgtctctcagagcttatactgctcggtgtaggttaaacagactacgtcgtgcagcatgccgtttgtttacttctgaaaaaatggttaaagctattaaaaagcttgaaattgaaattgaagctaggcggttaattgttcgaaaagatagacacctatggaaagatgtgggagaacgtcagaaagtcctgaattggctgttgtcctacaatcctttgtggcttcgaattggtctagagacaacttatggagaactcatatctttggaagataacagtgatgtcacagggttggctatgtttattctgaatcgcctactttggaatcctgatatagcagctgagtatagacaccccactgttcctcacctgtatagagatggtcatgaagaagctttgtccaagtttacattgaaaaagttattgttgttggtctgttttcttgattatgctaaaatttccagactcattgatcatgatccttgtctcttctgtaaagatgccgaattcaaggctagtaaagaaatccttttggctttttcacgagatttcctaagtggtgaaggtgacctttcccgtcaccttggcttattgggattacctgttaaccatgttcagacaccatttgatgaatttgattttgccgttacaaatcttgccgtagacttgcaatgtggagtgcgccttgtgcgaaccatggaacttctcacacagaactgggacctctcaaagaaactcaggattccggcaataagtcgtcttcaaaagatgcacaatgttgacattgttcttcaagttcttaaatcacgaggaattgaattaagtgatgagcatggaaatacaattctatctaaggatattgtggataggcacagagaaaaaactctcaggttgctttggaaaatagcgtttgcttttcaggtggatatttcccttaacttagatcaattaaaggaagaaattgcctttctaaaacacacaaagagtataaagaaaacaatatctctactatcatgccattctgatgatcttattaataagaaaaaaggcaaaagggatagtggttcctttgaacaatatagtgaaaacataaagttattgatggattgggtaaatgctgtttgtgccttctataataaaaaggtggagaattttacagtgtctttctcagacggccgtgtgttatgttacctgatccaccattaccatccttgctatgtgccatttgacgctatatgtcagcgtactactcaaactgtggaatgtacgcaaactggttcagtggtattaaattcatcatctgaatctgatgacagttctctggatatgtctcttaaagcatttgatcatgaaaatacttcagagctatacaaagagctcctagaaaatgaaaagaaaaattttcacttggttaggtctgcagttagagaccttggtggaatacctgctatgattaatcattcagatatgtcaaatacaattccagatgaaaaggtggttattacctatttgtcatttctttgtgcaaggcttttggatcttcgtaaagaaataagagctgctcgactcatacaaacaacatggagaaaatataaactaaaaacagatctcaaacgccatcaggagagagagaaagctgcaagaattattcaattggctgtaatcaattttctagcaaaacaaagattgagaaaaagagttaatgcagcactcgtcattcagaaatattggcgaagagtcttagcacagagaaaattattaatgttaaaaaaggaaaagctggaaaaagttcaaaataaagcagcatcacttattcagggatattggagaagatattccactagacaaagatttctgaaattgaaatattattcaatcatcctgcaatctaggataagaatgataattgctgttacatcttataaacgatatctttgggctacagttacaattcagaggcattggcgtgcttatttaagaagaaaacaagatcaacaaagatatgaaatgctaaaatcatcaactcttataatccaatctatgttcagaaaatggaagcaacgtaaaatgcaatcacaagtaaaagctacagtaatattgcaaagagcttttagagaatggcatttaagaaaacaagctaaagaagaaaattctgctattatcatacaatcatggtatagaatgcataaagaattacggaaatatatttatattagatcttgtgttgttatcattcagaaaagatttcggtgctttcaagcccaaaagttatataaaagaagaaaagagtccatactaaccatccagaagtactacaaagcatatctgaaaggaaagattgagcgcaccaactatttgcagaaacgagctgcagccattcaattacaagctgcttttaggagactgaaagctcataatttatgtagacaaattagagctgcttgtgttattcagtcatactggagaatgagacaagacagagttcgatttttaaaccttaagaagactattatcaaatttcaggcacatgtaagaaaacatcaacaacgacagaaatataagaagatgaagaaagcagctgttataattcagactcatttccgagcttatatttttgccatgaaagttctagcatcttaccagaaaacacgctctgctgtcattgtgctgcagtctgcatatagagggatgcaagccaggaaaatgtatattcacatcctcacatctgttataaagattcaatcatattatcgtgcttatgtttctaaaaaggaatttttgagcctaaaaaatgctacaataaaattgcagtcaactgttaagatgaaacaaacacgtaaacaatatttgcatttaagagcagctgcactatttatccagcaatgttaccgttccaaaaaaatagctgcacaaaagagagaagagtatatgcagatgcgggaatcttgtatcaaactgcaagcatttgttagaggataccttgtccgaaagcagatgaggttacaaagaaaagctgttatttcactacagtcttatttcagaatgagaaaggctcggcagtattatctgaaaatgtataaagcaattattgtcattcagaattactatcatgcatacaaagcacaggtcaatcagaggaagaacttcttgcaagtcaaaaaagcagctacttgcttgcaagcagcttacagaggttataaagtacgccagctaatcaaacaacaatctatagctgctcttaaaattcagtctgcttttagaggctataataaaagggtaaaatatcaatctgtgcttcaatctataataaagattcagagatggtacagggcgtacaagactcttcatgatacaagaacacattttttgaagacaaaggcagctgtgatttccctccagtctgcttatcgtggctggaaggttcggaaacagattagaagggaacatcaagctgccttgaagattcagtctgcttttagaatggccaaggcccagaaacagtttagattgtttaaaacagcagcattagtcatccagcaaaatttcagagcatggactgcaggaaggaagcaatgtatggagtatattgaactccgtcatgcggtactggtgcttcaatctatgtggaagggaaaaacactgagaagacagcttcaaaggcaacataaatgtgctatcatcatacagtcatactatagaatgcatgtgcaacaaaagaagtggaaaatcatgaaaaaagctgctcttctgattcaaaagtattatagggcttacagtattggaagagaacagaatcatttatatttgaaaacaaaagcagctgtagtaactttacagtcagcttatcgtggtatgaaagtgagaaaaagaataaaggattgcaacaaagcagcagtcactatacagtctaaatacagagcttacaaaaccaaaaagaaatatgcaacctatagagcttcagctattataattcagagatggtatcgaggtattaaaattacaaaccatcagcataaggagtatcttaatttgaagaagacagcaattaaaatccaatctgtttatagaggtattagagttagaagacatattcaacacatgcacagggcagccacttttattaaagccatgtttaaaatgcatcagtcaagaataagttaccatacaatgagaaaagcagctattgttattcaagtaagatgtagagcatattatcaaggtaaaatgcagcgtgaaaagtacctgacaattttgaaagctgttaaagtccttcaggcaagttttagaggagtaagagttagacggactcttagaaagatgcagactgcagcaacactcattcagtcaaactacagaagatacagacagcaaacatactttaataagttaaagaaaataacaaaaacagtacagcaaagatactgggcaatgaaagaaagaaacatacaatttcaaaggtataacaaactgaggcattctgtaatatacattcaggctatttttaggggaaagaaagctagaagacatttaaaaatgatgcatatagccgcaactctcattcagaggagatttagaactctaatgatgagaagaagattcctctctctcaagaaaactgctattttgattcagagaaaatatcgggcacatctttgtacaaagcatcacttacagttccttcaggtacaaaatgcagttattaaaatccagtcatcatacagaagatggatgataaggaaaaggatgcgagagatgcacagggctgctactttcatccagtctactttcagaatgcacagattacatatgagatatcaggctttgaaacaggcctccgttgtgatccaacagcaataccaagcaaatagagctgcaaaactgcagaggcagcattatctcagacaaagacactctgctgtgatccttcaggctgcattcaggggtatgaaaactagaagacatttgaagagtatgcattcctctgcaacccttattcagagtaggtttagatcattactggtgaggagaagattcatttccctcaaaaaagctactatttttgttcagaggaaatatcgagccaccatttgtgccaaacataaattgtaccaattcttgcacttaagaaaggcagccattacaatacagtcatcttacagaagactgatggtaaagaagaagttacaagaaatgcaaagggctgcagttctcattcaggctactttcaggatgtacagaacatatattacatttcagacttggaaacatgcttcaattctaattcagcaacattatcgaacatatagagctgcaaaattacaaagagaaaattatatcagacaatggcattctgctgtggttattcaggctgcatataaaggaatgaaagcaagacaacttttaagggaaaaacacaaagcttctatcgtaatacaaagcacctacagaatgtataggcagtattgtttctaccaaaagcttcagtgggctacaaaaatcatacaagaaaaatatagagcaaataaaaagaaacagaaagtatttcaacacaatgaacttaagaaagagacttgtgttcaggcaggttttcaggacatgaacataaaaaaacagattcaggaacagcaccaggctgccattattattcagaagcattgtaaagcctttaaaataaggaagcattatctccaccttagagcaacagtagtttctattcaaagaagatacagaaaactaactgcagtgcgtacccaagcagttatttgtatacagtcttattacagaggctttaaagtacgaaaggatattcaaaatatgcaccgggctgccacactaattcagtcattctatcgaatgcacagggccaaagttgattatgaaacaaagaaaactgcaattgtggttatacagaattattataggttgtatgttagagtaaaaacagaaagaaaaaactttttagcagttcagaaatctgtacgaactattcaggctgcttttagaggcatgaaagttagacaaaaattgaaaaatgtatcagaggaaaagatggcagccattgttaaccaatctgcactctgctgttacagaagtaaaactcagtatgaagctgttcaaagtgaaggtgttatgattcaagagtggtataaagcttctggccttgcttgttcacaggaagcagagtatcattctcaaagtagggctgcagtaacaattcaaaaagctttttgtagaatggtcacaagaaaactggaaacacagaaatgtgctgccctacggattcagttcttccttcagatggctgtgtatcggagaagatttgttcagcagaaaagagctgctatcactttacagcattattttaggacgtggcaaaccagaaaacagtttttactatatagaaaagcagcagtggttttacaaaatcactacagagcatttctgtctgcaaaacatcaaagacaagtctatttacagatcagaagcagtgttatcattattcaagctagaagtaaaggatttatacagaaacggaagtttcaggaaattaaaaatagcaccataaaaattcaggctatgtggaggagatatagagccaagaaatatttatgtaaagtgaaagctgcctgcaagattcaagcctggtatagatgttggagagcacacaaagaatatctagctatattaaaagctgttaaaattattcaaggttgcttctataccaaactagagagaacacggtttttgaatgtgagagcatcagcaattatcattcagagaaaatggagagctatacttcctgcaaagatagctcatgaacacttcttaatgataaaaagacatcgagctgcttgtttgatccaagcacattatagaggatataaaggaaggcaggtctttcttcggcagaaatctgctgctttgatcatacaaaaatatatacgagccagggaggctggaaagcatgaaaggataaaatatattgaatttaaaaaatctacagttatcctacaagcactggtgcgtggttggctagtacgaaaaagatttttagaacagagagccaaaattcgacttcttcacttcactgcagctgcatattatcacctgaatgctgttagaattcaaagagcctataaactttacctggctgtgaagaatgctaacaagcaggttaattcagtcatctgtattcagagatggtttcgagcaagattacaagaaaagagatttattcagaaatatcatagcatcaaaaagattgagcatgaaggtcaagaatgtctgagccagcgaaatagggctgcatcagtaatacagaaagcagtgcgccattttctcctccgtaaaaagcaggaaaaattcactagtggaatcattaaaattcaggcattatggagaggctattcttggaggaagaaaaatgattgtacaaaaattaaagctatacgactaagtcttcaagttgttaatagggagattcgagaagaaaacaaactctacaaaagaactgcacttgcacttcattaccttttgacatataagcacctttctgccattcttgaggccttaaaacacctagaggtagttactagattgtctccactttgttgtgagaacatggcccagagtggagcaatttctaaaatatttgttttgatccgaagttgtaatcgcagtattccttgtatggaagtcatcagatatgctgtgcaagtcttgcttaatgtatctaagtatgagaaaactacttcagcagtttatgatgtagaaaattgtatagatatactattggagcttttgcagatataccgagaaaagcctggtaataaagttgcagacaaaggcggaagcatttttacaaaaacttgttgtttgttggctattttactgaagacaacaaatagagcctctgatgtacgaagtaggtccaaagttgttgaccgtatttacagtctctacaaacttacagctcataaacataaaatgaatactgaaagaatactttacaagcaaaagaagaattcttctataagcattccttttatcccagaaacacctgtaaggaccagaatagtttcaagacttaagccagattgggttttgagaagagataacatggaagaaatcacaaatcccctgcaagctattcaaatggtgatggatacgcttggcattccttattagtaaatgtaaacattttcagtatgtatagtgtaaagaaatattaaagccaatcatgagtacgtaaagtgatttttgctctccgtgtacaacttttaaaatctgactttgttttaaaaaaacataaactgttcattacattcttcatttttatcatttatagttttatgcatgtaataaactaatatgtcataagatgaaaaaaaaaaaaaaaaaaa

SEQ ID NO: 498 - DNA, 2279 bp, Homo sapiens
cttggcagggcacgtgcgggaggaagtggagctccctgtacgcgcggccctagtcggctcctcaacgtggagcgatgggaggccttgagaagaagaagtatgaacgaggctcggccaccaactacatcacccggaacaaagcccggaagaagctccagctgagcttggctgactttaggcggctgtgcattctgaagggcatttatccccatgaacccaaacacaagaagaaggttaacaagggttctacagcagcccgaacgttttaccttatcaaagacatcaggtttctcctccacgaacccattgtcaacaagttccgtgaatacaaggtgttcgtccggaagctccggaaggcttatgggaagagcgagtggaacactgtagagcgtttaaaggacaataagcccaactacaaactcgaccacatcatcaaggaacggtatcccacgttcatcgatgccctgcgggacctggacgatgccctctccatgtgcttcctgttttccaccttcccgcggactggcaagtgccacgtgcagaccattcagctgtgccgccggctcactgtggagttcatgcactacattatcgctgcccgtgccctgcgcaaggtcttcctgtccatcaaaggcatttactaccaggccgaggtactggggcagcccatcgtgtggatcactccctatgccttctcccatgaccacccgacagacgtggactacagggtcatggccaccttcaccgagttctacaccacgctgctgggctttgtcaacttccgcctttaccagttgctcaacctccactatcccccgaagctcgagggtcaggcccaagcagaggcaaaggccggtgagggcacctacgcgttggactccgagagttgtatggagaaactggcagccctcagtgccagcctggcccgcgtggtggtgcctgccacagaggaggaggccgaggtggatgagtttcccaccgatggggagatgtcagcgcaggaggaagaccgcaggaaggagctggaggcgcaggagaagcacaagaagctttttgagggcctgaagttcttcctgaaccgagaggtgccccgtgaggccctggccttcatcatcaggagttttggtggggaagtgtcctgggacaaatctttgtgcattggggccacctatgacgtcacagactcccgcatcacccatcagattgtcgaccggcctgggcagcagacctcagtcattggcaggtgctacgtgcagccccagtgggtgtttgactcagtgaacgccaggctccttctccccgtggcagagtacttctctggggtgcagctgcccccacacctttcaccctttgtgaccgagaaggaaggagattacgttccacctgagaagctgaagctgctggctctgcagcggggagaggacccaggaaacctgaatgagtcagaagaggaggaggaagaggacgacaacaacgaaggtgatggtgatgaagagggagaaaatgaggaggaggaggaagatgcagaggctggttcagaaaaggaggaagaggcccggctggcagccctggaagagcagaggatggaggggaagaagcccagggtgatggcaggcaccttgaagctggaggataagcagcggctggcccaggaggaggagagtgaggccaagcgcctggccattatgatgatgaagaagcgggagaagtacctgtaccagaagatcatgtttggcaagaggcgaaaaatccgagaggccaacaagctggcggagaagcggaaagcccacgatgaggcggtgaggtctgagaagaaggccaagaaggcaaggccggagtgagtgcctgcggcccctcacagggctgaggccagcccctagcagctggatgtggcagaggcaggccagaggacctaagtgtgatggaccagagtcacttctcctcctcctttctccagccagccctgacccctcatgctctctggctgggccagtgggcagccctcgcttcccttggatggagctgccctgctggtgcctggtcagagaagaggcctctgtgcccagcctgattctctgctcccaggagccagtgacatgaggtgcagaggcccacccagccccctacctactgcccccattcatcctggctttccacagccccctcccacacagttggacccgtgattctcagggtgctgtgatggggtgagggtagggggagcatttgttattaaatgactggacttttgtgccaattgcaaaaaaaaaaaaaaaaaa

SEQ ID NO: 499 - DNA, 4422 bp, Homo sapiens
ggcagtggccgtgtgggttgaggctgcgaggacagcgcgggcccccgggcctctcccctgagccggccgcctgggccgcgcggtcgaggcctgtcagcctccgcccgttcagcctcggggccggggccgccgccacctctgcccgcggaggccggggagcccctgcctgggcccgcagcctcccccgcgggggtcgggcccgggcgggggtcccgagcagctgccctcctcgccggcatccgagcctcatttcctgctttttcagtttccttggggaggggcgggtgggtctggatgaattgtctcggggtcccccgatgaggcgacccgggcggccctgccctttttagagggtcccctcggggcccggtggggaaggggttgtctttgcatgggtgggggacttcccgagtctgccgggaccatgacctgaactgtgcgagcgggacgtgtccgaagcccaagaaccagctcatctgagccgccccctccccggccagcatggcatctgaagaagcctctctcagggcattggaaagtctgatgacagaattttttcacgattgtacaaccaatgaaagaaaacgtgagatagaggagcttcttaataactttgcccagcaaataggagcctggagattctgcctgtactttctctccagcactaggaatgactatgtaatgatgtacagtttaacagtttttgagaatctgatcaataaaatgtggcttggggtcccatctcaggataagatggaaatccgtagctgtctgcccaaactccttttggctcaccataaaaccttaccttactttatccggaacaagctctgcaaagttattgttgatattggacgtcaggattggcccatgttctaccacgacttttttactaacattttacagttgatccagtcccctgtgacaaccccccttgggctgatcatgttgaagacaacttcagaagagctggcttgtccccgtgaggacctcagtgtggctcggaaggaggagttgcggaagctgctactggaccaggtgcagacagtgcttgggctactgacaggtatcttggagactgtctgggacaaacacagtgttactgctgccactccaccaccatccccgacctcaggagaaagtggtgacttactgagtaacctgttgcagagtcccagttcagccaaactgttgaatcagccaattcccatccttgatgtggagagtgagtatatctgttccctggctttggagtgcctggcccatctcttcagttggattcctctgtctgccagcatcaccccatccctccttaccaccatcttccactttgcacgatttggctgtgacatccgggccagaaagatggcgtcagttaacggcagcagccagaactgtgtctcgggtcaggagcgcggccggctgggggtcctggccatgtcctgcatcaatgaactcatgtccaagaactgtgtgcctatggaatttgaggagtatttactgcgtatgttccagcagactttctacctcctgcagaaaatcaccaaggataacaatgcccacacagtgaagagcaggctagaagagctcgatgagagctatatcgagaagtttactgactttcttcggctctttgtgagtgttcacctaagaagaatcgagtcttactcccagttccctgtggtggagtttttgacacttttgttcaagtacacatttcatcagcctactcatgaaggttacttctcttgtttggatatctggacgctgtttttggactatctgacaagtaaaattaaaagtcgtcttggagacaaggaagcagttctcaacaggtacgaagatgccctggtgctcctgctcacagaggtgttgaatcgaatccagttcagatacaaccaagcccagctggaggagttggatgatgagactctggatgacgatcagcagacggagtggcagcggtacttacggcagagcttggaggtggtggccaaagtgatggagctcctgcccacgcacgccttctccacactgttccctgttcttcaggacaatttagaagtttatttgggattacaacagtttatagtcacttcagggtcaggacacaggttgaacatcacggcggagaacgactgccggcggctgcactgctccctgagagacttgagctccctgctgcaggccgtgggccgcctggccgagtactttatcggggatgtgtttgctgcacggttcaatgatgccctcacagtcgtggaaaggttggtcaaagtcactctgtacggatctcagataaaattgtacaacattgaaactgctgtgccatcagtattgaaacctgacctcattgatgtgcatgctcagtccctggctgcgctgcaggcttactctcactggttagcacagtattgcagtgaagttcaccggcagaacacgcagcagttcgtgacactcatctctactaccatggatgcaatcacacctctaatcagcaccaaggtccaagacaagctgctgctatctgcgtgccacttactggtctcactggccaccaccgtgcggcccgtctttctgatcagcatccctgcagtgcagaaagtattcaacagaatcactgatgcctctgccctgcgacttgtcgataaggcccaggtgttggtgtgccgagccctctctaacatcttgctgcttccgtggccaaaccttccagagaatgagcagcagtggcccgtgcgctccatcaaccatgccagcctcatctctgcactctcccgggactatcgcaacctgaagcccagtgctgttgccccacagagaaagatgccactggatgacaccaaactgattatccaccagacactcagcgtcttagaagatattgtggagaatatctcgggggagtccaccaagtctcgacagatttgctaccagtcgctgcaggaatctgttcaggtctccctggccctctttccagcttttatccatcagtcagatgtgactgatgagatgctgagcttcttcctcactctgtttcgaggccttagagtacagatgggtgtgcctttcactgagcaaatcatacagactttcctcaacatgtttaccagagagcagttagccgagagcatcctccacgagggcagcacaggctgccgggtggtggagaagtttctgaagatcctgcaggtggtggtccaggagccaggccaggtgttcaagcccttcctccccagcatcatcgccctgtgcatggagcaagtgtatcccatcattgccgagcgtccctcccctgatgtgaaggccgagctgtttgagctccttttccggacgctccatcacaactggaggtacttcttcaagtccaccgtgctggccagtgtccagagggggatcgctgaggagcagatggagaatgagccccagttcagtgccatcatgcaggctttcggacagtcctttctccagcccgacatccacctttttaaacaaaatctcttctacttggagactctcaacaccaagcagaagctgtaccacaagaagatcttccggactgccatgctgttccagtttgtgaacgtgctgctccaggtcctggtccacaagtcccatgatcttctgcaggaggagattggcatcgccatctacaacatggcctcagtcgactttgatggcttctttgccgccttcctcccagagttcctgaccagctgtgatggtgtggatgccaaccagaaaagtgtgctggggcggaatttcaagatggatcgggacctgccctcattcacccagaatgtgcacaggctggtcaacgacctgcgctactacagactctgcaacgacagcctgccccctggcactgtgaagctctaggcctgctactgcctggggacacggacttctgctgctgccacctgcgccagccctaccttccaccacagatgtctcccagatgggccttggtcacactccttggcttctcccaccgcaagcaacgctgcctgcctctgccgctcctccacatcttgccgctgcccagcagagctggcttctgggtccacctgagcactggacggtgctcccagggcgttggagcaggcggaggggtgtgtggccaggtactaggaggcaccaggaaatcccgcggggtggcccatgcagaccaggcgcacgtggctcatggggcagaattgccaaggacagctcacgacagtgccaccttctcaccattccagccaaggagagatgtgacgttggaactgctctggcacttctgtcaagcctcccccgccccaattgccttgagatctctgctctttgtcagagatttgcaaagactcacgtttttgttgttttctcatcattccattgtgatactaagaaactaagaagcttaatgaaaagaaataaaatgcc

SEQ ID NO: 500 - DNA, 2218 bp, Homo sapiens
aagtaagatggcggcgaacgcacttccggcgtgtgtccttacgggtgcgtccgggcggctgcttgcaggtgccacccagcgggttccagcttgtttgctgcatagattacaacggtgatggcgggcaagcggtccggctggagccgggcggctctcctccagctccttctcggcgtgaacctggtggtgatgccgcccacccgggcccggagtctgcgcttcgttaccttgctgtaccgccatggagaccgttcaccagtgaagacatatcccaaggacccctatcaggaagaagaatggccccaggggtttggtcagttaaccaaggaggggatgctacagcactgggaactgggccaggccctgcggcagcgctatcacggcttcctaaacacctcttatcaccggcaagaggtttatgtgcgaagcacagactttgaccggactctcatgagtgctgaggccaacctggctggactcttccctcccaacgggatgcagcgcttcaacccgaacatctcgtggcagcctattcctgtgcacactgtgcccatcactgaggacaggctgctgaagttcccgttgggcccatgtccccgttatgagcagctgcagaacgagacccggcagacaccagagtatcagaatgagagttctcggaatgcacaatttctggacatggtggccaacgagacagggcttacagacctgacactggagaccgtctggaatgtctatgacacactcttctgtgagcaaacgcacgggctgcgcctgccgccctgggcctcaccccaaaccatgcagcgtctcagccggctaaaggacttcagcttccgcttcctcttcggaatctaccagcaggcggagaaggcccggcttcaggggggagtcctgctggctcagataaggaagaacctgaccctaatggcgaccacctcccagctccccaagctgctggtttactctgcgcacgacactaccctggttgccctgcaaatggcactggatgtctacaatggtgaacaagccccctacgcctcctgccacatatttgaactgtaccaggaagattctgggaatttctcagtggagatgtactttcggaacgagagtgacaaggccccctggccgctcagcctgcctggctgccctcaccgctgcccactgcaggacttccttcgcctcacagagcccgtcgtgcccaaggattggcagcaggagtgccagctggcaagcggtcctgcagacacagaggtgattgtggccttggctgtatgtggctccatcctcttcctcctcatagtgctgctcctcaccgtcctcttccggatgcaggcccagcctcctggctaccgccacgtcgcagatggggaggaccacgcctgacaaccactcagcccccttccctccacctcctaggggaggtgggctgggccctcgctcctgactgttgctgctccccagcccatggacaggagatcctgggttgggcctccctctgatgaccccagccagatgagcgagtggggctcagcgtggcccatggtgcctgtcactcagcattcccatgcctgatgtttaccaagtgctgtgttggacactggctttctccaaacaggatttgcctcctccacgctccctacacacctgagatgtaaactggcagtcagtgttcactcaggacctaggattagaaaatggcagagttggtgctggatccaccttgcacttctatcaagccctgttctttttcctccagcctgaagtcttcggcaaatagctcagagggacacggtcttgcctctcagtgcttattttagtgggaaaaacagctaataccaggggtacaaacattggctcccaaggaactggatcacccaacagccagccagccacatttccctgtgtctggctagagccaccattagactcagacagaatgcttcaggaatcgttgtcaccccttcaactggagcaggacggaaggttgtctgtacttgggagggagtggggagtggtgggaagggagttgcttgtcacacgaatcaggaaactgctctccctcagctgggctggggtctccagggacctgagctacatgcaggttgtgagctggaaaagaaagttctagactgtggcccagaatagggctggggcagctcccagagaatgaatagtgctgtttcctattggactgataaaaaaaaaaaaaaaa

SEQ ID NO: 501 - DNA, 2308 bp, Homo sapiens
acttccgcgggcacccaactgtgcgtctcctgcgcgctgacgtcaggtgcgtgcccctgtccggcagccgaggagaccccgcgcagtgctgccaacgccccggtggagaagctgagacggagtctcactgtgttgcccaggctggagtgcagtggcgccatcttggctcactgcagtgcgcctctgccccccgagttcaagcgattctcctgcctcaggctcctgagtagctgggactacaggtcatcatcagatttgaaatatttaaagtggatacaaaactatttcagcaatgcagacaattaagtgtgttgttgtgggcgatggtgctgttggtaaaacatgtctcctgatatcctacacaacaaacaaatttccatcggaatatgtaccgactgtttttgacaactatgcagtcacagttatgattggtggagaaccatatactcttggactttttgatactgcagggcaagaggattatgacagattacgaccgctgagttatccacaaacagatgtatttctagtctgtttttcagtggtctctccatcttcatttgaaaacgtgaaagaaaagtgggtgcctgagataactcaccactgtccaaagactcctttcttgcttgttgggactcaaattgatctcagagatgacccctctactattgagaaacttgccaagaacaaacagaagcctatcactccagagactgctgaaaagctggcccgtgacctgaaggctgtcaagtatgtggagtgttctgcacttacacagaaaggcctaaagaatgtatttgacgaagcaatattggctgccctggagcctccagaaccgaagaagagccgcaggtgtgtgctgctatgaacatctctccagagccctttctgcacagctggtgtcggcatcatactaaaagcaatgtttaaatcaaactaaagattaaaaattaaaattcgtttttgcaataatgacaaatgccctgcacctacccacatgcactcgtgtgagacaaggcccataggtatggccccccccttccccctcccagtactagttaattttgagtaattgtattgtcagaaaagtgattagtactatttttttttgttgtttcaaaaaaaaaatttttgtgtgtgtgtgttttttttttttttttttttgttgtttaaaagcaaggcatgcttgtggatgactctgtaacagactaattggaattgttgaagctgctccctggttccactctggagagtaatctgggacatcttagtgttttgttttgtttttttccctcctcttttttttgggggggagtgtgtgtggggtttgttttttagtcttgtttttttaattcattaaccagtggttagcccttaaggggaggaggacggattgattccacattccacttcctagatctagtttagaaaacatgttccccatctggtgctcttaggaaggagtatagtaaatgcctcatttaataacatactcctttttgaaagttgccttttctctccacccttgagtagatccagtatttgatgaaactcatgaaagtgggtggagcccatcttgcccctcctcttttctaggacgcactatatgtgactgtgactttcaaggacatttgtttgccatttgctgatttttttgggaagttaatttctaacttctttcactgataaatgaagaaaagtattgcacctttgaaatgcaccaaatgaattgagtttgtaattaaaaaaatttttttccctttcagtcattgtcttatatgcttagcatagatttgcagctcagtagtatatggtgttcctagaatgcagctgaagacctgttatgtagaggaaatacgaggggtggtgctagaagacagacatctgtggaatgattcacatcctctcaagttaggaggatggaggcctgcttcattaagaagctgggggtagggtgggggtggggagaacacttaacaacatggggaccagtcaggggaatccccttatttctgttttgcatatgaggaaccctagagcagccaggtgaggctctctagtttaataaaaatcatggaaagactcttaatgcagactcttcttaagtgttaatagggattttttcagcttattttggttgcagtttccaatttttaaaaatgttgaggtaatctttcccaccttcccaaacctaattcttgtagatgcattagtgttgaaccaatgctttctcatgtctcaattctttgtatatgcattcttttcagatgtattaaacaaacaaaaacccttcaaaaaaaaaaaaaaa
